(19) United States
(12) Patent Application Publication
(10) Pub. No.: US 2005/0101000 A1
(43) Pub. Date: May 12, 2005

(54) Modulation of phosphodiesterase 4B expression

(75) Inventors: C. Frank Bennett, Carlsbad, CA (US); Kenneth W. Dobie, Del Mar, CA (US)

Correspondence Address: FENWICK & WEST LLP, 801 CALIFORNIA STREET, MOUNTAIN VIEW, CA, 94014, US

(73) Assignee: Isis Pharmaceuticals Inc.

(21) Appl. No.: 10/317,869

(22) Filed: Dec. 11, 2002

(51) Int. Cl. A61K 39/395; C12N 9/16

(52) U.S. Cl. 435/196; 424/146.1

(57) ABSTRACT

Compounds, compositions and methods are provided for modulating the expression of phosphodiesterase 4B. The compositions comprise oligonucleotides, targeted to nucleic acid encoding phosphodiesterase 4B. Methods of using these compounds for modulation of phosphodiesterase 4B expression and for diagnosis and treatment of disease associated with expression of phosphodiesterase 4B are provided.

### FIELD OF THE INVENTION

[0001] The present invention provides compositions and methods for modulating the expression of phosphodiesterase 4B. In particular, this invention relates to compounds, particularly oligonucleotide compounds, which, in preferred embodiments, hybridize with nucleic acid molecules encoding phosphodiesterase 4B. Such compounds are shown herein to modulate the expression of phosphodiesterase 4B.

### BACKGROUND OF THE INVENTION

[0002] Cyclic nucleotides function as intracellular second messengers in transduction of a variety of extracellular signals. Cyclic nucleotide phosphodiesterases, which degrade cyclic nucleotides to their corresponding monophosphates, play a role in these processes by regulating the intracellular concentration of cyclic nucleotides.

[0003] The phosphodiesterases are represented by a large superfamily of enzymes that possess a modular architecture, with a conserved catalytic domain near the carboxyl terminus and regulatory domains or motifs near the amino terminus. The phosphodiesterase superfamily currently includes 19 different genes sub-grouped into 10 different phosphodiesterase families. Each family is distinguished functionally by its unique combination of enzymatic characteristics (Soderling and Beavo, Curr. Opin. Cell Biol., 2000, 12, 174-179). The existence of multiple phosphodiesterase families, isozymes and splice variants presents an opportunity for complex regulation of cyclic nucleotide levels. Phosphodiesterases 1-7 have been implicated in regulation of insulin secretion, T-cell activation, fertility and growth and erectile function (Soderling and Beavo, Curr. Opin. Cell Biol., 2000, 12, 174-179).

[0004] The cAMP-specific phosphodiesterase 4 family (a rolipram {4-[3-(cyclopentoxyl)-4-methoxyphenyl]-2-pyrrolidone}-inhibited phosphodiesterase subfamily) was first recognized as a distinct entity after it was found that compounds such as rolipram act as specific and selective inhibitors of this enzyme family and have potential therapeutic use as anti-inflammatory agents and anti-depressants. Sensitivity to rolipram inhibition also permitted the categorization, as phosphodiesterase 4 family members, of various previously isolated and purified cAMP-specific phosphodiesterase species (Huston et al., Biochem. J., 1997, 328, 549-558).

[0005] Phosphodiesterase 4B (also known as dunce (Drosophila)-homolog phosphodiesterase E4 and rolipram-sensitive, cAMP-specific phosphodiesterase (PDE2)) was first identified by in a human lymphocytic B-cell line and was later mapped to chromosome 1p31 (Huston et al., Biochem. J., 1997, 328, 549-558; Livi et al., Mol. Cell. Biol., 1990, 10, 2678-2686; Milatovich et al., Somat. Cell Mol. Genet., 1994, 20, 75-86).

[0006] The phosphodiesterase 4B gene produces 3 splice variants known as HSPDE4B1, HSPDE4B2 and HSPDE4B3 which have been proposed to modulate catalytic activity, susceptibility to inhibition by the antidepressant drug rolipram and modes of interaction with particulate fractions (Huston et al., Biochem. J., 1997, 328, 549-558).

[0007] Nucleic acid sequences encoding phosphodiesterase 4B are disclosed in U.S. Pat. Nos. 5,977,305 and 6,306,583 (Livi et al., 2001; Wigler and Colicelli, 1999).

[0008] Ma et al. have identified phosphodiesterase 4B as the only lipopolysaccharide-inducible phosphodiesterase 4 subtype and have suggested that phosphodiesterase 4B may thus be an appropriate target for anti-inflammatory drug discovery (Ma et al., Mol. Pharmacol., 1999, 55, 50-57).

[0009] Chronic antidepressant drug administration has been found to cause an increase in expression of phosphodiesterase 4B. Takahashi et al. have proposed that this increase in expression may represent a compensatory response to antidepressant treatment and activation of the be a useful target for the development of novel therapeutic agents (Takahashi et al., J. Neurosci., 1999, 19, 610-618).

[0010] Small molecule inhibitors of phosphodiesterase 4B other than the antidepressant drug rolipram are well known in the art. For example, disclosed and claimed in PCT publication WO 01/79526 are phosphodiesterase 4 dislocators (small molecules, peptides or polypeptides) that remove phosphodiesterase 4 from its native location in the cell (Terry et al., 2001). Additional small molecule inhibitors of phosphodiesterase 4 are disclosed and claimed in U.S. Pat. Nos. 6,372,777 and 6,376,489 (Martins et al., 2002; Martins et al., 2002).

[0011] Disclosed and claimed in PCT publication WO 02/00926 is the use of oligonucleotides and/or peptide nucleic acid oligomers complementary to phosphodiesterase 4B for therapy of diseases (Olek et al., 2002).

[0012] Disclosed and claimed in PCT publication WO 00/40714 are chemically modified antisense oligonucleotides targeting phosphodiesterase 4B at positions 720-696, 1441-1417, 2185-2166, 2506-2482, 269-247, 995-971, 1787-1763, 1889-1865, 3254-3235 and 3951-3927 of GenBank accession number L20971 and pharmaceutical compositions comprised of said oligonucleotide and a pharmaceutically acceptable carrier (Dale et al., 2000).

[0013] There remains a long felt need for additional agents capable of effectively inhibiting phosphodiesterase 4B function.

[0014] Antisense technology is emerging as an effective means for reducing the expression of specific gene products and may therefore prove to be uniquely useful in a number of therapeutic, diagnostic, and research applications for the modulation of expression of phosphodiesterase 4B.

[0015] The present invention provides compositions and methods for modulating expression of phosphodiesterase 4B, including modulating expression of variants of phosphodiesterase 4B.

### SUMMARY OF THE INVENTION

[0016] The present invention is directed to compounds, especially nucleic acid and nucleic acid-like oligomers, which are targeted to a nucleic acid encoding phosphodiesterase 4B, and which modulate the expression of phosphodiesterase 4B. Pharmaceutical and other compositions comprising the compounds of the invention are also provided. Further provided are methods of screening for modulators of phosphodiesterase 4B and methods of modulating the expression of phosphodiesterase 4B in cells, tissues or animals comprising contacting said cells, tissues or animals with one or more of the compounds or compositions of the invention. Methods of treating an animal, particularly a human, suspected of having or being prone to a disease or condition associated with expression of phosphodiesterase 4B are also set forth herein. Such methods comprise administering a therapeutically or prophylactically effective amount of one or more of the compounds or compositions of the invention to the person in need of treatment.

### DETAILED DESCRIPTION OF THE INVENTION

A. Overview of the Invention

[0017] The present invention employs compounds, preferably oligonucleotides and similar species for use in modulating the function or effect of nucleic acid molecules encoding phosphodiesterase 4B. This is accomplished by providing oligonucleotides which specifically hybridize with one or more nucleic acid molecules encoding phosphodiesterase 4B. As used herein, the terms “target nucleic acid” and “nucleic acid molecule encoding phosphodiesterase 4B” have been used for convenience to encompass DNA encoding phosphodiesterase 4B, RNA (including pre-mRNA and mRNA or portions thereof) transcribed from such DNA, and also cDNA derived from such RNA. The hybridization of a compound of this invention with its target nucleic acid is generally referred to as “antisense”. Consequently, the preferred mechanism believed to be included in the practice of some preferred embodiments of the invention is referred to herein as “antisense inhibition.” Such antisense inhibition is typically based upon hydrogen bonding-based hybridization of oligonucleotide strands or segments such that at least one strand or segment is cleaved, degraded, or otherwise rendered inoperable. In this regard, it is presently preferred to target specific nucleic acid molecules and their functions for such antisense inhibition.

[0018] The functions of DNA to be interfered with can include replication and transcription. Replication and transcription, for example, can be from an endogenous cellular template, a vector, a plasmid construct or otherwise. The functions of RNA to be interfered with can include functions such as translocation of the RNA to a site of protein translation, translocation of the RNA to sites within the cell which are distant from the site of RNA synthesis, translation of protein from the RNA, splicing of the RNA to yield one or more RNA species, and catalytic activity or complex formation involving the RNA which may be engaged in or facilitated by the RNA. One preferred result of such interference with target nucleic acid function is modulation of the expression of phosphodiesterase 4B. In the context of the present invention, “modulation” and “modulation of expression” mean either an increase (stimulation) or a decrease (inhibition) in the amount or levels of a nucleic acid molecule encoding the gene, e.g., DNA or RNA. Inhibition is often the preferred form of modulation of expression and mRNA is often a preferred target nucleic acid.

[0019] In the context of this invention, “hybridization” means the pairing of complementary strands of oligomeric compounds. In the present invention, the preferred mechanism of pairing involves hydrogen bonding, which may be Watson-Crick, Hoogsteen or reversed Hoogsteen hydrogen bonding, between complementary nucleoside or nucleotide bases (nucleobases) of the strands of oligomeric compounds. For example, adenine and thymine are complementary nucleobases which pair through the formation of hydrogen bonds. Hybridization can occur under varying circumstances.

[0020] An antisense compound is specifically hybridizable when binding of the compound to the target nucleic acid interferes with the normal function of the target nucleic acid to cause a loss of activity, and there is a sufficient degree of complementarity to avoid non-specific binding of the antisense compound to non-target nucleic acid sequences under conditions in which specific binding is desired, i.e., under physiological conditions in the case of in vivo assays or therapeutic treatment, and under conditions in which assays are performed in the case of in vitro assays.

[0021] In the present invention the phrase “stringent hybridization conditions” or “stringent conditions” refers to conditions under which a compound of the invention will hybridize to its target sequence, but to a minimal number of other sequences. Stringent conditions are sequence-dependent and will be different in different circumstances and in the context of this invention, “stringent conditions” under which oligomeric compounds hybridize to a target sequence are determined by the nature and composition of the oligomeric compounds and the assays in which they are being investigated.

[0022] “Complementary,” as used herein, refers to the capacity for precise pairing between two nucleobases of an oligomeric compound. For example, if a nucleobase at a certain position of an oligonucleotide (an oligomeric compound), is capable of hydrogen bonding with a nucleobase at a certain position of a target nucleic acid, said target nucleic acid being a DNA, RNA, or oligonucleotide molecule, then the position of hydrogen bonding between the oligonucleotide and the target nucleic acid is considered to be a complementary position. The oligonucleotide and the further DNA, RNA, or oligonucleotide molecule are complementary to each other when a sufficient number of complementary positions in each molecule are occupied by nucleobases which can hydrogen bond with each other. Thus, “specifically hybridizable” and “complementary” are terms which are used to indicate a sufficient degree of precise pairing or complementarity over a sufficient number of nucleobases such that stable and specific binding occurs between the oligonucleotide and a target nucleic acid.

[0023] It is understood in the art that the sequence of an antisense compound need not be 100% complementary to that of its target nucleic acid to be specifically hybridizable. Moreover, an oligonucleotide may hybridize over one or more segments such that intervening or adjacent segments are not involved in the hybridization event (e.g., a loop structure or hairpin structure). It is preferred that the antisense compounds of the present invention comprise at least 70% sequence complementarity to a target region within the target nucleic acid, more preferably that they comprise 90% sequence complementarity and even more preferably comprise 95% sequence complementarity to the target region within the target nucleic acid sequence to which they are targeted. For example, an antisense compound in which 18 of 20 nucleobases of the antisense compound are complementary to a target region, and would therefore specifically hybridize, would represent 90 percent complementarity. In this example, the remaining noncomplementary nucleobases may be clustered or interspersed with complementary nucleobases and need not be contiguous to each other or to complementary nucleobases. As such, an antisense compound which is 18 nucleobases in length having 4 (four) noncomplementary nucleobases which are flanked by two regions of complete complementarity with the target nucleic acid would have 77.8% overall complementarity with the target nucleic acid and would thus fall within the scope of the present invention. Percent complementarity of an antisense compound with a region of a target nucleic acid can be determined routinely using BLAST programs (basic local alignment search tools) and PowerBLAST programs known in the art (Altschul et al., J. Mol. Biol., 1990, 215, 403-410; Zhang and Madden, Genome Res., 1997, 7, 649-656).

B. Compounds of the Invention

[0024] According to the present invention, compounds include antisense oligomeric compounds, antisense oligonucleotides, ribozymes, external guide sequence (EGS) oligonucleotides, alternate splicers, primers, probes, and other oligomeric compounds which hybridize to at least a portion of the target nucleic acid. As such, these compounds may be introduced in the form of single-stranded, double-stranded, circular or hairpin oligomeric compounds and may contain structural elements such as internal or terminal bulges or loops. Once introduced to a system, the compounds of the invention may elicit the action of one or more enzymes or structural proteins to effect modification of the target nucleic acid. One non-limiting example of such an enzyme is RNAse H, a cellular endonuclease which cleaves the RNA strand of an RNA:DNA duplex. It is known in the art that single-stranded antisense compounds which are “DNA-like” elicit RNAse H. Activation of RNase H, therefore, results in cleavage of the RNA target, thereby greatly enhancing the efficiency of oligonucleotide-mediated inhibition of gene expression. Similar roles have been postulated for other ribonucleases such as those in the RNase III and ribonuclease L family of enzymes.

[0025] While the preferred form of antisense compound is a single-stranded antisense oligonucleotide, in many species the introduction of double-stranded structures, such as double-stranded RNA (dsRNA) molecules, has been shown to induce potent and specific antisense-mediated reduction of the function of a gene or its associated gene products. This phenomenon occurs in both plants and animals and is believed to have an evolutionary connection to viral defense and transposon silencing.

[0026] The first evidence that dsRNA could lead to gene silencing in animals came in 1995 from work in the nematode, Caenorhabditis elegans (Guo and Kempheus, Cell, 1995, 81, 611-620). Montgomery et al. have shown that the primary interference effects of dsRNA are posttranscriptional (Montgomery et al., Proc. Natl. Acad. Sci. USA, 1998, 95, 15502-15507). The posttranscriptional antisense mechanism defined in Caenorhabditis elegans resulting from exposure to double-stranded RNA (dsRNA) has since been designated RNA interference (RNAi). This term has been generalized to mean antisense-mediated gene silencing involving the introduction of dsRNA leading to the sequence-specific reduction of endogenous targeted mRNA levels (Fire et al., Nature, 1998, 391, 806-811). Recently, it has been shown that it is, in fact, the single-stranded RNA oligomers of antisense polarity of the dsRNAs which are the potent inducers of RNAi (Tijsterman et al., Science, 2002, 295, 694-697).

[0027] In the context of this invention, the term “oligomeric compound” refers to a polymer or oligomer comprising a plurality of monomeric units. In the context of this invention, the term “oligonucleotide” refers to an oligomer or polymer of ribonucleic acid (RNA) or deoxyribonucleic acid (DNA) or mimetics, chimeras, analogs and homologs thereof. This term includes oligonucleotides composed of naturally occurring nucleobases, sugars and covalent internucleoside (backbone) linkages as well as oligonucleotides having non-naturally occurring portions which function similarly. Such modified or substituted oligonucleotides are often preferred over native forms because of desirable properties such as, for example, enhanced cellular uptake, enhanced affinity for a target nucleic acid and increased stability in the presence of nucleases.

[0028] While oligonucleotides are a preferred form of the compounds of this invention, the present invention comprehends other families of compounds as well, including but not limited to oligonucleotide analogs and mimetics such as those described herein.

[0029] The compounds in accordance with this invention preferably comprise from about 8 to about 80 nucleobases (i.e. from about 8 to about 80 linked nucleosides). One of ordinary skill in the art will appreciate that the invention embodies compounds of 8, 9, 10, 11, 12, 13, 14, 15, 16, 17, 18, 19, 20, 21, 22, 23, 24, 25, 26, 27, 28, 29, 30, 31, 32, 33, 34, 35, 36, 37, 38, 39, 40, 41, 42, 43, 44, 45, 46, 47, 48, 49, 50, 51, 52, 53, 54, 55, 56, 57, 58, 59, 60, 61, 62, 63, 64, 65, 66, 67, 68, 69, 70, 71, 72, 73, 74, 75, 76, 77, 78, 79, or 80 nucleobases in length.

[0030] In one preferred embodiment, the compounds of the invention are 12 to 50 nucleobases in length. One having ordinary skill in the art will appreciate that this embodies compounds of 12, 13, 14, 15, 16, 17, 18, 19, 20, 21, 22, 23, 24, 25, 26, 27, 28, 29, 30, 31, 32, 33, 34, 35, 36, 37, 38, 39, 40, 41, 42, 43, 44, 45, 46, 47, 48, 49, or 50 nucleobases in length.

[0031] In another preferred embodiment, the compounds of the invention are 15 to 30 nucleobases in length. One having ordinary skill in the art will appreciate that this embodies compounds of 15, 16, 17, 18, 19, 20, 21, 22, 23, 24, 25, 26, 27, 28, 29, or 30 nucleobases in length.

[0032] Particularly preferred compounds are oligonucleotides from about 12 to about 50 nucleobases, even more preferably those comprising from about 15 to about 30 nucleobases.

[0033] Antisense compounds 8-80 nucleobases in length comprising a stretch of at least eight (8) consecutive nucleobases selected from within the illustrative antisense compounds are considered to be suitable antisense compounds as well.

[0034] Exemplary preferred antisense compounds include oligonucleotide sequences that comprise at least the 8 consecutive nucleobases from the 5′-terminus of one of the illustrative preferred antisense compounds (the remaining nucleobases being a consecutive stretch of the same oligonucleotide beginning immediately upstream of the 5′-terminus of the antisense compound which is specifically hybridizable to the target nucleic acid and continuing until the oligonucleotide contains about 8 to about 80 nucleobases). Similarly preferred antisense compounds are represented by oligonucleotide sequences that comprise at least the 8 consecutive nucleobases from the 3′-terminus of one of the illustrative preferred antisense compounds (the remaining nucleobases being a consecutive stretch of the same oligonucleotide beginning immediately downstream of the 3′-terminus of the antisense compound which is specifically hybridizable to the target nucleic acid and continuing until the oligonucleotide contains about 8 to about 80 nucleobases). One having skill in the art armed with the preferred antisense compounds illustrated herein will be able, without undue experimentation, to identify further preferred antisense compounds.

C. Targets of the Invention

[0035] “Targeting” an antisense compound to a particular nucleic acid molecule, in the context of this invention, can be a multistep process. The process usually begins with the identification of a target nucleic acid whose function is to be modulated. This target nucleic acid may be, for example, a cellular gene (or mRNA transcribed from the gene) whose expression is associated with a particular disorder or disease state, or a nucleic acid molecule from an infectious agent. In the present invention, the target nucleic acid encodes phosphodiesterase 4B.

[0036] The targeting process usually also includes determination of at least one target region, segment, or site within the target nucleic acid for the antisense interaction to occur such that the desired effect, e.g., modulation of expression, will result. Within the context of the present invention, the term “region” is defined as a portion of the target nucleic acid having at least one identifiable structure, function, or characteristic. Within regions of target nucleic acids are segments. “Segments” are defined as smaller or sub-portions of regions within a target nucleic acid. “Sites,” as used in the present invention, are defined as positions within a target nucleic acid.

[0037] Since, as is known in the art, the translation initiation codon is typically 5′-AUG (in transcribed mRNA molecules; 5′-ATG in the corresponding DNA molecule), the translation initiation codon is also referred to as the “AUG codon,” the “start codon” or the “AUG start codon”. A minority of genes have a translation initiation codon having the RNA sequence 5′-GUG, 5′-UUG or 5′-CUG, and 5′-AUA, 5′-ACG and 5′-CUG have been shown to function in vivo. Thus, the terms “translation initiation codon” and “start codon” can encompass many codon sequences, even though the initiator amino acid in each instance is typically methionine (in eukaryotes) or formylmethionine (in prokaryotes). It is also known in the art that eukaryotic and prokaryotic genes may have two or more alternative start codons, any one of which may be preferentially utilized for translation initiation in a particular cell type or tissue, or under a particular set of conditions. In the context of the invention, “start codon” and “translation initiation codon” refer to the codon or codons that are used in vivo to initiate translation of an mRNA transcribed from a gene encoding phosphodiesterase 4B, regardless of the sequence(s) of such codons. It is also known in the art that a translation termination codon (or “stop codon”) of a gene may have one of three sequences, i.e., 5′-UAA, 5′-UAG and 5′-UGA (the corresponding DNA sequences are 5′-TAA, 5′-TAG and 5′-TGA, respectively).

[0038] The terms “start codon region” and “translation initiation codon region” refer to a portion of such an mRNA or gene that encompasses from about 25 to about 50 contiguous nucleotides in either direction (i.e., 5′ or 3′) from a translation initiation codon. Similarly, the terms “stop codon region” and “translation termination codon region” refer to a portion of such an mRNA or gene that encompasses from about 25 to about 50 contiguous nucleotides in either direction (i.e., 5′ or 3′) from a translation termination codon. Consequently, the “start codon region” (or “translation initiation codon region”) and the “stop codon region” (or “translation termination codon region”) are all regions which may be targeted effectively with the antisense compounds of the present invention.

[0039] The open reading frame (ORF) or “coding region,” which is known in the art to refer to the region between the translation initiation codon and the translation termination codon, is also a region which may be targeted effectively. Within the context of the present invention, a preferred region is the intragenic region encompassing the translation initiation or termination codon of the open reading frame (ORF) of a gene.

[0040] Other target regions include the 5′ untranslated region (5′UTR), known in the art to refer to the portion of an mRNA in the 5′ direction from the translation initiation codon, and thus including nucleotides between the 5′ cap site and the translation initiation codon of an mRNA (or corresponding nucleotides on the gene), and the 3′ untranslated region (3′UTR), known in the art to refer to the portion of an mRNA in the 3′ direction from the translation termination codon, and thus including nucleotides between the translation termination codon and 3′ end of an mRNA (or corresponding nucleotides on the gene). The 5′ cap site of an mRNA comprises an N7-methylated guanosine residue joined to the 5′-most residue of the mRNA via a 5′-5′ triphosphate linkage. The 5′ cap region of an mRNA is considered to include the 5′ cap structure itself as well as the first 50 nucleotides adjacent to the cap site. It is also preferred to target the 5′ cap region.

[0041] Although some eukaryotic mRNA transcripts are directly translated, many contain one or more regions, known as “introns,” which are excised from a transcript before it is translated. The remaining (and therefore translated) regions are known as “exons” and are spliced together to form a continuous mRNA sequence. Targeting splice sites, i.e., intron-exon junctions or exon-intron junctions, may also be particularly useful in situations where aberrant splicing is implicated in disease, or where an overproduction of a particular splice product is implicated in disease. Aberrant fusion junctions due to rearrangements or deletions are also preferred target sites. mRNA transcripts produced via the process of splicing of two (or more) mRNAs from different gene sources are known as “fusion transcripts”. It is also known that introns can be effectively targeted using antisense compounds targeted to, for example, DNA or pre-mRNA.

[0042] It is also known in the art that alternative RNA transcripts can be produced from the same genomic region of DNA. These alternative transcripts are generally known as “variants”. More specifically, “pre-mRNA variants” are transcripts produced from the same genomic DNA that differ from other transcripts produced from the same genomic DNA in either their start or stop position and contain both intronic and exonic sequence.

[0043] Upon excision of one or more exon or intron regions, or portions thereof during splicing, pre-mRNA variants produce smaller “mRNA variants”. Consequently, mRNA variants are processed pre-mRNA variants and each unique pre-mRNA variant must always produce a unique mRNA variant as a result of splicing. These mRNA variants are also known as “alternative splice variants”. If no splicing of the pre-mRNA variant occurs then the pre-mRNA variant is identical to the mRNA variant.

[0044] It is also known in the art that variants can be produced through the use of alternative signals to start or stop transcription and that pre-mRNAs and mRNAs can possess more that one start codon or stop codon. Variants that originate from a pre-mRNA or mRNA that use alternative start codons are known as “alternative start variants” of that pre-mRNA or mRNA. Those transcripts that use an alternative stop codon are known as “alternative stop variants” of that pre-mRNA or mRNA. One specific type of alternative stop variant is the “polyA variant” in which the multiple transcripts produced result from the alternative selection of one of the “polyA stop signals” by the transcription machinery, thereby producing transcripts that terminate at unique polyA sites. Within the context of the invention, the types of variants described herein are also preferred target nucleic acids.

[0045] The locations on the target nucleic acid to which the preferred antisense compounds hybridize are hereinbelow referred to as “preferred target segments.” As used herein the term “preferred target segment” is defined as at least an 8-nucleobase portion of a target region to which an active antisense compound is targeted. While not wishing to be bound by theory, it is presently believed that these target segments represent portions of the target nucleic acid which are accessible for hybridization.

[0046] While the specific sequences of certain preferred target segments are set forth herein, one of skill in the art will recognize that these serve to illustrate and describe particular embodiments within the scope of the present invention. Additional preferred target segments may be identified by one having ordinary skill.

[0047] Target segments 8-80 nucleobases in length comprising a stretch of at least eight (8) consecutive nucleobases selected from within the illustrative preferred target segments are considered to be suitable for targeting as well.

[0048] Target segments can include DNA or RNA sequences that comprise at least the 8 consecutive nucleobases from the 5′-terminus of one of the illustrative preferred target segments (the remaining nucleobases being a consecutive stretch of the same DNA or RNA beginning immediately upstream of the 5′-terminus of the target segment and continuing until the DNA or RNA contains about 8 to about 80 nucleobases). Similarly preferred target segments are represented by DNA or RNA sequences that comprise at least the 8 consecutive nucleobases from the 3′-terminus of one of the illustrative preferred target segments (the remaining nucleobases being a consecutive stretch of the same DNA or RNA beginning immediately downstream of the 3′-terminus of the target segment and continuing until the DNA or RNA contains about 8 to about 80 nucleobases). One having skill in the art armed with the preferred target segments illustrated herein will be able, without undue experimentation, to identify further preferred target segments.

[0049] Once one or more target regions, segments or sites have been identified, antisense compounds are chosen which are sufficiently complementary to the target, i.e., hybridize sufficiently well and with sufficient specificity, to give the desired effect.

D. Screening and Target Validation

[0050] In a further embodiment, the “preferred target segments” identified herein may be employed in a screen for additional compounds that modulate the expression of phosphodiesterase 4B. “Modulators” are those compounds that decrease or increase the expression of a nucleic acid molecule encoding phosphodiesterase 4B and which comprise at least an 8-nucleobase portion which is complementary to a preferred target segment. The screening method comprises the steps of contacting a preferred target segment of a nucleic acid molecule encoding phosphodiesterase 4B with one or more candidate modulators, and selecting for one or more candidate modulators which decrease or increase the expression of a nucleic acid molecule encoding phosphodiesterase 4B. Once it is shown that the candidate modulator or modulators are capable of modulating (e.g. either decreasing or increasing) the expression of a nucleic acid molecule encoding phosphodiesterase 4B, the modulator may then be employed in further investigative studies of the function of phosphodiesterase 4B, or for use as a research, diagnostic, or therapeutic agent in accordance with the present invention.

[0051] The preferred target segments of the present invention may be also be combined with their respective complementary antisense compounds of the present invention to form stabilized double-stranded (duplexed) oligonucleotides.

[0052] Such double stranded oligonucleotide moieties have been shown in the art to modulate target expression and regulate translation as well as RNA processsing via an antisense mechanism. Moreover, the double-stranded moieties may be subject to chemical modifications (Fire et al., Nature, 1998, 391, 806-811; Timmons and Fire, Nature 1998, 395, 854; Timmons et al., Gene, 2001, 263, 103-112; Tabara et al., Science, 1998, 282, 430-431; Montgomery et al., Proc. Natl. Acad. Sci. USA, 1998, 95, 15502-15507; Tuschl et al., Genes Dev., 1999, 13, 3191-3197; Elbashir et al., Nature, 2001, 411, 494-498; Elbashir et al., Genes Dev. 2001, 15, 188-200). For example, such double-stranded moieties have been shown to inhibit the target by the classical hybridization of antisense strand of the duplex to the target, thereby triggering enzymatic degradation of the target (Tijsterman et al., Science, 2002, 295, 694-697).

[0053] The compounds of the present invention can also be applied in the areas of drug discovery and target validation. The present invention comprehends the use of the compounds and preferred target segments identified herein in drug discovery efforts to elucidate relationships that exist between phosphodiesterase 4B and a disease state, phenotype, or condition. These methods include detecting or modulating phosphodiesterase 4B comprising contacting a sample, tissue, cell, or organism with the compounds of the present invention, measuring the nucleic acid or protein level of phosphodiesterase 4B and/or a related phenotypic or chemical endpoint at some time after treatment, and optionally comparing the measured value to a non-treated sample or sample treated with a further compound of the invention. These methods can also be performed in parallel or in combination with other experiments to determine the function of unknown genes for the process of target validation or to determine the validity of a particular gene product as a target for treatment or prevention of a particular disease, condition, or phenotype.

E. Kits, Research Reagents, Diagnostics, and Therapeutics

[0054] The compounds of the present invention can be utilized for diagnostics, therapeutics, prophylaxis and as research reagents and kits. Furthermore, antisense oligonucleotides, which are able to inhibit gene expression with exquisite specificity, are often used by those of ordinary skill to elucidate the function of particular genes or to distinguish between functions of various members of a biological pathway.

[0055] For use in kits and diagnostics, the compounds of the present invention, either alone or in combination with other compounds or therapeutics, can be used as tools in differential and/or combinatorial analyses to elucidate expression patterns of a portion or the entire complement of genes expressed within cells and tissues.

[0056] As one nonlimiting example, expression patterns within cells or tissues treated with one or more antisense compounds are compared to control cells or tissues not treated with antisense compounds and the patterns produced are analyzed for differential levels of gene expression as they pertain, for example, to disease association, signaling pathway, cellular localization, expression level, size, structure or function of the genes examined. These analyses can be performed on stimulated or unstimulated cells and in the presence or absence of other compounds which affect expression patterns.

[0057] Examples of methods of gene expression analysis known in the art include DNA arrays or microarrays (Brazma and Vilo, FEBS Lett., 2000, 480, 17-24; Celis, et al., FEBS Lett., 2000, 480, 2-16), SAGE (serial analysis of gene expression)(Madden, et al., Drug Discov. Today, 2000, 5, 415-425), READS (restriction enzyme amplification of digested cDNAs) (Prashar and Weissman, Methods Enzymol., 1999, 303, 258-72), TOGA (total gene expression analysis) (Sutcliffe, et al., Proc. Natl. Acad. Sci. U.S.A., 2000, 97, 1976-81), protein arrays and proteomics (Celis, et al., FEBS Lett., 2000, 480, 2-16; Jungblut, et al., Electrophoresis, 1999, 20, 2100-10), expressed sequence tag (EST) sequencing (Celis, et al., FEBS Lett., 2000, 480, 2-16; Larsson, et al., J. Biotechnol., 2000, 80, 143-57), subtractive RNA fingerprinting (SuRF) (Fuchs, et al., Anal. Biochem., 2000, 286, 91-98; Larson, et al., Cytometry, 2000, 41, 203-208), subtractive cloning, differential display (DD) (Jurecic and Belmont, Curr. Opin. Microbiol., 2000, 3, 316-21), comparative genomic hybridization (Carulli, et al., J. Cell Biochem. Suppl., 1998, 31, 286-96), FISH (fluorescent in situ hybridization) techniques (Going and Gusterson, Eur. J. Cancer, 1999, 35, 1895-904) and mass spectrometry methods (To, Comb. Chem. High Throughput Screen, 2000, 3, 235-41).

[0058] The compounds of the invention are useful for research and diagnostics, because these compounds hybridize to nucleic acids encoding phosphodiesterase 4B. For example, oligonucleotides that are shown to hybridize with such efficiency and under such conditions as disclosed herein as to be effective phosphodiesterase 4B inhibitors will also be effective primers or probes under conditions favoring gene amplification or detection, respectively. These primers and probes are useful in methods requiring the specific detection of nucleic acid molecules encoding phosphodiesterase 4B and in the amplification of said nucleic acid molecules for detection or for use in further studies of phosphodiesterase 4B. Hybridization of the antisense oligonucleotides, particularly the primers and probes, of the invention with a nucleic acid encoding phosphodiesterase 4B can be detected by means known in the art. Such means may include conjugation of an enzyme to the oligonucleotide, radiolabelling of the oligonucleotide or any other suitable detection means. Kits using such detection means for detecting the level of phosphodiesterase 4B in a sample may also be prepared.

[0059] The specificity and sensitivity of antisense is also harnessed by those of skill in the art for therapeutic uses. Antisense compounds have been employed as therapeutic moieties in the treatment of disease states in animals, including humans. Antisense oligonucleotide drugs, including ribozymes, have been safely and effectively administered to humans and numerous clinical trials are presently underway. It is thus established that antisense compounds can be useful therapeutic modalities that can be configured to be useful in treatment regimes for the treatment of cells, tissues and animals, especially humans.

[0060] For therapeutics, an animal, preferably a human, suspected of having a disease or disorder which can be treated by modulating the expression of phosphodiesterase 4B is treated by administering antisense compounds in accordance with this invention. For example, in one non-limiting embodiment, the methods comprise the step of administering to the animal in need of treatment, a therapeutically effective amount of a phosphodiesterase 4B inhibitor. The phosphodiesterase 4B inhibitors of the present invention effectively inhibit the activity of the phosphodiesterase 4B protein or inhibit the expression of the phosphodiesterase 4B protein. In one embodiment, the activity or expression of phosphodiesterase 4B in an animal is inhibited by about 10%. Preferably, the activity or expression of phosphodiesterase 4B in an animal is inhibited by about 30%. More preferably, the activity or expression of phosphodiesterase 4B in an animal is inhibited by 50% or more.

[0061] For example, the reduction of the expression of phosphodiesterase 4B may be measured in serum, adipose tissue, liver or any other body fluid, tissue or organ of the animal. Preferably, the cells contained within said fluids, tissues or organs being analyzed contain a nucleic acid molecule encoding phosphodiesterase 4B protein and/or the phosphodiesterase 4B protein itself.

[0062] The compounds of the invention can be utilized in pharmaceutical compositions by adding an effective amount of a compound to a suitable pharmaceutically acceptable diluent or carrier. Use of the compounds and methods of the invention may also be useful prophylactically.

F. Modifications

[0063] As is known in the art, a nucleoside is a base-sugar combination. The base portion of the nucleoside is normally a heterocyclic base. The two most common classes of such heterocyclic bases are the purines and the pyrimidines. Nucleotides are nucleosides that further include a phosphate group covalently linked to the sugar portion of the nucleoside. For those nucleosides that include a pentofuranosyl sugar, the phosphate group can be linked to either the 2′, 3′ or 5′ hydroxyl moiety of the sugar. In forming oligonucleotides, the phosphate groups covalently link adjacent nucleosides to one another to form a linear polymeric compound. In turn, the respective ends of this linear polymeric compound can be further joined to form a circular compound, however, linear compounds are generally preferred. In addition, linear compounds may have internal nucleobase complementarity and may therefore fold in a manner as to produce a fully or partially double-stranded compound. Within oligonucleotides, the phosphate groups are commonly referred to as forming the internucleoside backbone of the oligonucleotide. The normal linkage or backbone of RNA and DNA is a 3′ to 5′phosphodiester linkage.

Modified Internucleoside Linkages (Backbones)

[0064] Specific examples of preferred antisense compounds useful in this invention include oligonucleotides containing modified backbones or non-natural internucleoside linkages. As defined in this specification, oligonucleotides having modified backbones include those that retain a phosphorus atom in the backbone and those that do not have a phosphorus atom in the backbone. For the purposes of this specification, and as sometimes referenced in the art, modified oligonucleotides that do not have a phosphorus atom in their internucleoside backbone can also be considered to be oligonucleosides.

[0065] Preferred modified oligonucleotide backbones containing a phosphorus atom therein include, for example, phosphorothioates, chiral phosphorothioates, phosphorodithioates, phosphotriesters, aminoalkylphosphotriesters, methyl and other alkyl phosphonates including 3′-alkylene phosphonates, 5′-alkylene phosphonates and chiral phosphonates, phosphinates, phosphoramidates including 3′-amino phosphoramidate and aminoalkylphosphoramidates, thionophosphoramidates, thionoalkylphosphonates, thionoalkylphosphotriesters, selenophosphates and boranophosphates having normal 3′-5′ linkages, 2′-5′ linked analogs of these, and those having inverted polarity wherein one or more internucleotide linkages is a 3′ to 3′, 5′ to 5′ or 2′ to 2′ linkage. Preferred oligonucleotides having inverted polarity comprise a single 3′ to 3′ linkage at the 3′-most internucleotide linkage i.e. a single inverted nucleoside residue which may be abasic (the nucleobase is missing or has a hydroxyl group in place thereof). Various salts, mixed salts and free acid forms are also included.

[0066] Representative United States patents that teach the preparation of the above phosphorus-containing linkages include, but are not limited to, U.S. Pat. Nos. 3,687,808; 4,469,863; 4,476,301; 5,023,243; 5,177,196; 5,188,897; 5,264,423; 5,276,019; 5,278,302; 5,286,717; 5,321,131; 5,399,676; 5,405,939; 5,453,496; 5,455,233; 5,466,677; 5,476,925; 5,519,126; 5,536,821; 5,541,306; 5,550,111; 5,563,253; 5,571,799; 5,587,361; 5,194,599; 5,565,555; 5,527,899; 5,721,218; 5,672,697 and 5,625,050, certain of which are commonly owned with this application, and each of which is herein incorporated by reference.

[0067] Preferred modified oligonucleotide backbones that do not include a phosphorus atom therein have backbones that are formed by short chain alkyl or cycloalkyl internucleoside linkages, mixed heteroatom and alkyl or cycloalkyl internucleoside linkages, or one or more short chain heteroatomic or heterocyclic internucleoside linkages. These include those having morpholino linkages (formed in part from the sugar portion of a nucleoside); siloxane backbones; sulfide, sulfoxide and sulfone backbones; formacetyl and thioformacetyl backbones; methylene formacetyl and thioformacetyl backbones; riboacetyl backbones; alkene containing backbones; sulfamate backbones; methyleneimino and methylenehydrazino backbones; sulfonate and sulfonamide backbones; amide backbones; and others having mixed N, O, S and CH₂ component parts.

[0068] Representative United States patents that teach the preparation of the above oligonucleosides include, but are not limited to, U.S. Pat. Nos. 5,034,506; 5,166,315; 5,185,444; 5,214,134; 5,216,141; 5,235,033; 5,264,562; 5,264,564; 5,405,938; 5,434,257; 5,466,677; 5,470,967; 5,489,677; 5,541,307; 5,561,225; 5,596,086; 5,602,240; 5,610,289; 5,602,240; 5,608,046; 5,610,289; 5,618,704; 5,623,070; 5,663,312; 5,633,360; 5,677,437; 5,792,608; 5,646,269 and 5,677,439, certain of which are commonly owned with this application, and each of which is herein incorporated by reference.

Modified Sugar and Internucleoside Linkages-Mimetics

[0069] In other preferred oligonucleotide mimetics, both the sugar and the internucleoside linkage (i.e. the backbone), of the nucleotide units are replaced with novel groups. The nucleobase units are maintained for hybridization with an appropriate target nucleic acid. One such compound, an oligonucleotide mimetic that has been shown to have excellent hybridization properties, is referred to as a peptide nucleic acid (PNA). In PNA compounds, the sugar-backbone of an oligonucleotide is replaced with an amide containing backbone, in particular an aminoethylglycine backbone. The nucleobases are retained and are bound directly or indirectly to aza nitrogen atoms of the amide portion of the backbone. Representative United States patents that teach the preparation of PNA compounds include, but are not limited to, U.S. Pat. Nos. 5,539,082; 5,714,331; and 5,719,262, each of which is herein incorporated by reference. Further teaching of PNA compounds can be found in Nielsen et al., Science, 1991, 254, 1497-1500.

[0070] Preferred embodiments of the invention are oligonucleotides with phosphorothioate backbones and oligonucleosides with heteroatom backbones, and in particular —CH₂—NH—O—CH₂—, —CH₂—N(CH₃)—O—CH₂— [known as a methylene (methylimino) or MMI backbone], —CH₂—O—N(CH₃)—CH₂—, —CH₂—N(CH₃)—N(CH₃)—CH₂— and —O—N(CH₃)—CH₂—CH₂— [wherein the native phosphodiester backbone is represented as —O—P—O—CH₂—] of the above referenced U.S. Pat. No. 5,489,677, and the amide backbones of the above referenced U.S. Pat. No. 5,602,240. Also preferred are oligonucleotides having morpholino backbone structures of the above-referenced U.S. Pat. No. 5,034,506.

Modified Sugars

[0071] Modified oligonucleotides may also contain one or more substituted sugar moieties. Preferred oligonucleotides comprise one of the following at the 2′ position: OH; F; O-, S-, or N-alkyl; O-, S-, or N-alkenyl; O-, S- or N-alkynyl; or O-alkyl-O-alkyl, wherein the alkyl, alkenyl and alkynyl may be substituted or unsubstituted C₁ to C₁₀ alkyl or C₂ to C₁₀ alkenyl and alkynyl. Particularly preferred are O[(CH₂)ₙO]ₘCH₃, O(CH₂)ₙOCH₃, O(CH₂)ₙNH₂, O(CH₂)ₙCH₃, O(CH₂)ₙONH₂, and O(CH₂)ₙON[(CH₂)ₙCH₃]₂, where n and m are from 1 to about 10. Other preferred oligonucleotides comprise one of the following at the 2′ position: C₁ to C₁₀ lower alkyl, substituted lower alkyl, alkenyl, alkynyl, alkaryl, aralkyl, O-alkaryl or O-aralkyl, SH, SCH₃, OCN, Cl, Br, CN, CF₃, OCF₃, SOCH₃, SO₂CH₃, ONO₂, NO₂, N₃, NH₂, heterocycloalkyl, heterocycloalkaryl, aminoalkylamino, polyalkylamino, substituted silyl, an RNA cleaving group, a reporter group, an intercalator, a group for improving the pharmacokinetic properties of an oligonucleotide, or a group for improving the pharmacodynamic properties of an oligonucleotide, and other substituents having similar properties. A preferred modification includes 2′-methoxyethoxy (2′-O—CH₂CH₂OCH₃, also known as 2′-O-(2-methoxyethyl) or 2′-MOE) (Martin et al., Helv. Chim. Acta, 1995, 78, 486-504) i.e., an alkoxyalkoxy group. A further preferred modification includes 2′-dimethylaminooxyethoxy, i.e., a O(CH₂)₂ON(CH₃)₂ group, also known as 2′-DMAOE, as described in examples hereinbelow, and 2′-dimethylaminoethoxyethoxy (also known in the art as 2′-O-dimethyl-amino-ethoxy-ethyl or 2′-DMAEOE), i.e., 2′-O—CH₂—O—CH₂—N(CH₃)₂, also described in examples hereinbelow.

[0072] Other preferred modifications include 2′-methoxy (2′-O—CH₃), 2′-aminopropoxy (2′-OCH₂CH₂CH₂NH₂), 2′-allyl (2′-CH₂—CH═CH₂), 2′-O-allyl (2′-O—CH₂—CH═CH₂) and 2′-fluoro (2′-F). The 2′-modification may be in the arabino (up) position or ribo (down) position. A preferred 2′-arabino modification is 2′-F. Similar modifications may also be made at other positions on the oligonucleotide, particularly the 3′ position of the sugar on the 3′ terminal nucleotide or in 2′-5′ linked oligonucleotides and the 5′ position of 5′ terminal nucleotide. Oligonucleotides may also have sugar mimetics such as cyclobutyl moieties in place of the pentofuranosyl sugar. Representative United States patents that teach the preparation of such modified sugar structures include, but are not limited to, U.S. Pat. Nos. 4,981,957; 5,118,800; 5,319,080; 5,359,044; 5,393,878; 5,446,137; 5,466,786; 5,514,785; 5,519,134; 5,567,811; 5,576,427; 5,591,722; 5,597,909; 5,610,300; 5,627,053; 5,639,873; 5,646,265; 5,658,873; 5,670,633; 5,792,747; and 5,700,920, certain of which are commonly owned with the instant application, and each of which is herein incorporated by reference in its entirety.

[0073] A further preferred modification of the sugar includes Locked Nucleic Acids (LNAs) in which the 2′-hydroxyl group is linked to the 3′ or 4′ carbon atom of the sugar ring, thereby forming a bicyclic sugar moiety. The linkage is preferably a methylene (—CH₂—)ₙ group bridging the 2′ oxygen atom and the 4′ carbon atom wherein n is 1 or 2. LNAs and preparation thereof are described in WO 98/39352 and WO 99/14226.

Natural and Modified Nucleobases

[0074] Oligonucleotides may also include nucleobase (often referred to in the art simply as “base”) modifications or substitutions. As used herein, “unmodified” or “natural” nucleobases include the purine bases adenine (A) and guanine (G), and the pyrimidine bases thymine (T), cytosine (C) and uracil (U). Modified nucleobases include other synthetic and natural nucleobases such as 5-methylcytosine (5-me-C), 5-hydroxymethyl cytosine, xanthine, hypoxanthine, 2-aminoadenine, 6-methyl and other alkyl derivatives of adenine and guanine, 2-propyl and other alkyl derivatives of adenine and guanine, 2-thiouracil, 2-thiothymine and 2-thiocytosine, 5-halouracil and cytosine, 5-propynyl (—C≡C—CH₃) uracil and cytosine and other alkynyl derivatives of pyrimidine bases, 6-azo uracil, cytosine and thymine, 5-uracil (pseudouracil), 4-thiouracil, 8-halo, 8-amino, 8-thiol, 8-thioalkyl, 8-hydroxyl and other 8-substituted adenines and guanines, 5-halo particularly 5-bromo, 5-trifluoromethyl and other 5-substituted uracils and cytosines, 7-methylguanine and 7-methyladenine, 2-F-adenine, 2-amino-adenine, 8-azaguanine and 8-azaadenine, 7-deazaguanine and 7-deazaadenine and 3-deazaguanine and 3-deazaadenine. Further modified nucleobases include tricyclic pyrimidines such as phenoxazine cytidine(1H-pyrimido[5,4-b][1,4]benzoxazin-2(3H)-one), phenothiazine cytidine (1H-pyrimido[5,4-b][1,4]benzothiazin-2(3H)-one), G-clamps such as a substituted phenoxazine cytidine (e.g. 9-(2-aminoethoxy)-H-pyrimido[5,4-b][1,4]benzoxazin-2(3H)-one), carbazole cytidine (2H-pyrimido[4,5-b]indol-2-one), pyridoindole cytidine (H-pyrido[3′,2′:4,5]pyrrolo[2,3-d]pyrimidin-2-one). Modified nucleobases may also include those in which the purine or pyrimidine base is replaced with other heterocycles, for example 7-deaza-adenine, 7-deazaguanosine, 2-aminopyridine and 2-pyridone. Further nucleobases include those disclosed in U.S. Pat. No. 3,687,808, those disclosed in The Concise Encyclopedia Of Polymer Science And Engineering, pages 858-859, Kroschwitz, J. I., ed. John Wiley & Sons, 1990, those disclosed by Englisch et al., Angewandte Chemie, International Edition, 1991, 30, 613, and those disclosed by Sanghvi, Y. S., Chapter 15, Antisense Research and Applications, pages 289-302, Crooke, S. T. and Lebleu, B., ed., CRC Press, 1993. Certain of these nucleobases are particularly useful for increasing the binding affinity of the compounds of the invention. These include 5-substituted pyrimidines, 6-azapyrimidines and N-2, N-6 and O-6 substituted purines, including 2-aminopropyladenine, 5-propynyluracil and 5-propynylcytosine. 5-methylcytosine substitutions have been shown to increase nucleic acid duplex stability by 0.6-1.2° C. and are presently preferred base substitutions, even more particularly when combined with 2′-O-methoxyethyl sugar modifications.

[0075] Representative United States patents that teach the preparation of certain of the above noted modified nucleobases as well as other modified nucleobases include, but are not limited to, the above noted U.S. Pat. No. 3,687,808, as well as U.S. Pat. Nos. 4,845,205; 5,130,302; 5,134,066; 5,175,273; 5,367,066; 5,432,272; 5,457,187; 5,459,255; 5,484,908; 5,502,177; 5,525,711; 5,552,540; 5,587,469; 5,594,121, 5,596,091; 5,614,617; 5,645,985; 5,830,653; 5,763,588; 6,005,096; and 5,681,941, certain of which are commonly owned with the instant application, and each of which is herein incorporated by reference, and U.S. Pat. No. 5,750,692, which is commonly owned with the instant application and also herein incorporated by reference.

Conjugates

[0076] Another modification of the oligonucleotides of the invention involves chemically linking to the oligonucleotide one or more moieties or conjugates which enhance the activity, cellular distribution or cellular uptake of the oligonucleotide. These moieties or conjugates can include conjugate groups covalently bound to functional groups such as primary or secondary hydroxyl groups. Conjugate groups of the invention include intercalators, reporter molecules, polyamines, polyamides, polyethylene glycols, polyethers, groups that enhance the pharmacodynamic properties of oligomers, and groups that enhance the pharmacokinetic properties of oligomers. Typical conjugate groups include cholesterols, lipids, phospholipids, biotin, phenazine, folate, phenanthridine, anthraquinone, acridine, fluoresceins, rhodamines, coumarins, and dyes. Groups that enhance the pharmacodynamic properties, in the context of this invention, include groups that improve uptake, enhance resistance to degradation, and/or strengthen sequence-specific hybridization with the target nucleic acid. Groups that enhance the pharmacokinetic properties, in the context of this invention, include groups that improve uptake, distribution, metabolism or excretion of the compounds of the present invention. Representative conjugate groups are disclosed in International Patent Application PCT/US92/09196, filed Oct. 23, 1992, and U.S. Pat. No. 6,287,860, the entire disclosure of which are incorporated herein by reference. Conjugate moieties include but are not limited to lipid moieties such as a cholesterol moiety, cholic acid, a thioether, e.g., hexyl-S-tritylthiol, a thiocholesterol, an aliphatic chain, e.g., dodecandiol or undecyl residues, a phospholipid, e.g., di-hexadecyl-rac-glycerol or triethyl-ammonium 1,2-di-O-hexadecyl-rac-glycero-3-H-phosphonate, a polyamine or a polyethylene glycol chain, or adamantane acetic acid, a palmityl moiety, or an octadecylamine or hexylamino-carbonyl-oxycholesterol moiety. Oligonucleotides of the invention may also be conjugated to active drug substances, for example, aspirin, warfarin, phenylbutazone, ibuprofen, suprofen, fenbufen, ketoprofen, (S)-(+)-pranoprofen, carprofen, dansylsarcosine, 2,3,5-triiodobenzoic acid, flufenamic acid, folinic acid, a benzothiadiazide, chlorothiazide, a diazepine, indomethicin, a barbiturate, a cephalosporin, a sulfa drug, an antidiabetic, an antibacterial or an antibiotic. Oligonucleotide-drug conjugates and their preparation are described in U.S. patent application Ser. No. 09/334,130 (filed Jun. 15, 1999) which is incorporated herein by reference in its entirety.

[0077] Representative United States patents that teach the preparation of such oligonucleotide conjugates include, but are not limited to, U.S. Pat. Nos. 4,828,979; 4,948,882; 5,218,105; 5,525,465; 5,541,313; 5,545,730; 5,552,538; 5,578,717, 5,580,731; 5,580,731; 5,591,584; 5,109,124; 5,118,802; 5,138,045; 5,414,077; 5,486,603; 5,512,439; 5,578,718; 5,608,046; 4,587,044; 4,605,735; 4,667,025; 4,762,779; 4,789,737; 4,824,941; 4,835,263; 4,876,335; 4,904,582; 4,958,013; 5,082,830; 5,112,963; 5,214,136; 5,082,830; 5,112,963; 5,214,136; 5,245,022; 5,254,469; 5,258,506; 5,262,536; 5,272,250; 5,292,873; 5,317,098; 5,371,241, 5,391,723; 5,416,203, 5,451,463; 5,510,475; 5,512,667; 5,514,785; 5,565,552; 5,567,810; 5,574,142; 5,585,481; 5,587,371; 5,595,726; 5,597,696; 5,599,923; 5,599,928 and 5,688,941, certain of which are commonly owned with the instant application, and each of which is herein incorporated by reference.

Chimeric Compounds

[0078] It is not necessary for all positions in a given compound to be uniformly modified, and in fact more than one of the aforementioned modifications may be incorporated in a single compound or even at a single nucleoside within an oligonucleotide.

[0079] The present invention also includes antisense compounds which are chimeric compounds. “Chimeric” antisense compounds or “chimeras,” in the context of this invention, are antisense compounds, particularly oligonucleotides, which contain two or more chemically distinct regions, each made up of at least one monomer unit, i.e., a nucleotide in the case of an oligonucleotide compound. These oligonucleotides typically contain at least one region wherein the oligonucleotide is modified so as to confer upon the oligonucleotide increased resistance to nuclease degradation, increased cellular uptake, increased stability and/or increased binding affinity for the target nucleic acid. An additional region of the oligonucleotide may serve as a substrate for enzymes capable of cleaving RNA:DNA or RNA:RNA hybrids. By way of example, RNAse H is a cellular endonuclease which cleaves the RNA strand of an RNA:DNA duplex. Activation of RNase H, therefore, results in cleavage of the RNA target, thereby greatly enhancing the efficiency of oligonucleotide-mediated inhibition of gene expression. The cleavage of RNA:RNA hybrids can, in like fashion, be accomplished through the actions of endoribonucleases, such as RNAseL which cleaves both cellular and viral RNA. Cleavage of the RNA target can be routinely detected by gel electrophoresis and, if necessary, associated nucleic acid hybridization techniques known in the art.

[0080] Chimeric antisense compounds of the invention may be formed as composite structures of two or more oligonucleotides, modified oligonucleotides, oligonucleosides and/or oligonucleotide mimetics as described above. Such compounds have also been referred to in the art as hybrids or gapmers. Representative United States patents that teach the preparation of such hybrid structures include, but are not limited to, U.S. Pat. Nos. 5,013,830; 5,149,797; 5,220,007; 5,256,775; 5,366,878; 5,403,711; 5,491,133; 5,565,350; 5,623,065; 5,652,355; 5,652,356; and 5,700,922, certain of which are commonly owned with the instant application, and each of which is herein incorporated by reference in its entirety.

G. Formulations

[0081] The compounds of the invention may also be admixed, encapsulated, conjugated or otherwise associated with other molecules, molecule structures or mixtures of compounds, as for example, liposomes, receptor-targeted molecules, oral, rectal, topical or other formulations, for assisting in uptake, distribution and/or absorption. Representative United States patents that teach the preparation of such uptake, distribution and/or absorption-assisting formulations include, but are not limited to, U.S. Pat. Nos. 5,108,921; 5,354,844; 5,416,016; 5,459,127; 5,521,291; 5,543,158; 5,547,932; 5,583,020; 5,591,721; 4,426,330; 4,534,899; 5,013,556; 5,108,921; 5,213,804; 5,227,170; 5,264,221; 5,356,633; 5,395,619; 5,416,016; 5,417,978; 5,462,854; 5,469,854; 5,512,295; 5,527,528; 5,534,259; 5,543,152; 5,556,948; 5,580,575; and 5,595,756, each of which is herein incorporated by reference.

[0082] The antisense compounds of the invention encompass any pharmaceutically acceptable salts, esters, or salts of such esters, or any other compound which, upon administration to an animal, including a human, is capable of providing (directly or indirectly) the biologically active metabolite or residue thereof. Accordingly, for example, the disclosure is also drawn to prodrugs and pharmaceutically acceptable salts of the compounds of the invention, pharmaceutically acceptable salts of such prodrugs, and other bioequivalents.

[0083] The term “prodrug” indicates a therapeutic agent that is prepared in an inactive form that is converted to an active form (i.e., drug) within the body or cells thereof by the action of endogenous enzymes or other chemicals and/or conditions. In particular, prodrug versions of the oligonucleotides of the invention are prepared as SATE [(S-acetyl-2-thioethyl) phosphate] derivatives according to the methods disclosed in WO 93/24510 to Gosselin et al., published Dec. 9, 1993 or in WO 94/26764 and U.S. Pat. No. 5,770,713 to Imbach et al.

[0084] The term “pharmaceutically acceptable salts” refers to physiologically and pharmaceutically acceptable salts of the compounds of the invention: i.e., salts that retain the desired biological activity of the parent compound and do not impart undesired toxicological effects thereto. For oligonucleotides, preferred examples of pharmaceutically acceptable salts and their uses are further described in U.S. Pat. No. 6,287,860, which is incorporated herein in its entirety.

[0085] The present invention also includes pharmaceutical compositions and formulations which include the antisense compounds of the invention. The pharmaceutical compositions of the present invention may be administered in a number of ways depending upon whether local or systemic treatment is desired and upon the area to be treated. Administration may be topical (including ophthalmic and to mucous membranes including vaginal and rectal delivery), pulmonary, e.g., by inhalation or insufflation of powders or aerosols, including by nebulizer; intratracheal, intranasal, epidermal and transdermal), oral or parenteral. Parenteral administration includes intravenous, intraarterial, subcutaneous, intraperitoneal or intramuscular injection or infusion; or intracranial, e.g., intrathecal or intraventricular, administration. Oligonucleotides with at least one 2′-O-methoxyethyl modification are believed to be particularly useful for oral administration. Pharmaceutical compositions and formulations for topical administration may include transdermal patches, ointments, lotions, creams, gels, drops, suppositories, sprays, liquids and powders. Conventional pharmaceutical carriers, aqueous, powder or oily bases, thickeners and the like may be necessary or desirable. Coated condoms, gloves and the like may also be useful.

[0086] The pharmaceutical formulations of the present invention, which may conveniently be presented in unit dosage form, may be prepared according to conventional techniques well known in the pharmaceutical industry. Such techniques include the step of bringing into association the active ingredients with the pharmaceutical carrier(s) or excipient(s). In general, the formulations are prepared by uniformly and intimately bringing into association the active ingredients with liquid carriers or finely divided solid carriers or both, and then, if necessary, shaping the product.

[0087] The compositions of the present invention may be formulated into any of many possible dosage forms such as, but not limited to, tablets, capsules, gel capsules, liquid syrups, soft gels, suppositories, and enemas. The compositions of the present invention may also be formulated as suspensions in aqueous, non-aqueous or mixed media. Aqueous suspensions may further contain substances which increase the viscosity of the suspension including, for example, sodium carboxymethylcellulose, sorbitol and/or dextran. The suspension may also contain stabilizers.

[0088] Pharmaceutical compositions of the present invention include, but are not limited to, solutions, emulsions, foams and liposome-containing formulations. The pharmaceutical compositions and formulations of the present invention may comprise one or more penetration enhancers, carriers, excipients or other active or inactive ingredients.

[0089] Emulsions are typically heterogenous systems of one liquid dispersed in another in the form of droplets usually exceeding 0.1 μm in diameter. Emulsions may contain additional components in addition to the dispersed phases, and the active drug which may be present as a solution in either the aqueous phase, oily phase or itself as a separate phase. Microemulsions are included as an embodiment of the present invention. Emulsions and their uses are well known in the art and are further described in U.S. Pat. No. 6,287,860, which is incorporated herein in its entirety.

[0090] Formulations of the present invention include liposomal formulations. As used in the present invention, the term “liposome” means a vesicle composed of amphiphilic lipids arranged in a spherical bilayer or bilayers. Liposomes are unilamellar or multilamellar vesicles which have a membrane formed from a lipophilic material and an aqueous interior that contains the composition to be delivered. Cationic liposomes are positively charged liposomes which are believed to interact with negatively charged DNA molecules to form a stable complex. Liposomes that are pH-sensitive or negatively-charged are believed to entrap DNA rather than complex with it. Both cationic and noncationic liposomes have been used to deliver DNA to cells.

[0091] Liposomes also include “sterically stabilized” liposomes, a term which, as used herein, refers to liposomes comprising one or more specialized lipids that, when incorporated into liposomes, result in enhanced circulation lifetimes relative to liposomes lacking such specialized lipids. Examples of sterically stabilized liposomes are those in which part of the vesicle-forming lipid portion of the liposome comprises one or more glycolipids or is derivatized with one or more hydrophilic polymers, such as a polyethylene glycol (PEG) moiety. Liposomes and their uses are further described in U.S. Pat. No. 6,287,860, which is incorporated herein in its entirety.

[0092] The pharmaceutical formulations and compositions of the present invention may also include surfactants. The use of surfactants in drug products, formulations and in emulsions is well known in the art. Surfactants and their uses are further described in U.S. Pat. No. 6,287,860, which is incorporated herein in its entirety.

[0093] In one embodiment, the present invention employs various penetration enhancers to effect the efficient delivery of nucleic acids, particularly oligonucleotides. In addition to aiding the diffusion of non-lipophilic drugs across cell membranes, penetration enhancers also enhance the permeability of lipophilic drugs. Penetration enhancers may be classified as belonging to one of five broad categories, i.e., surfactants, fatty acids, bile salts, chelating agents, and non-chelating non-surfactants. Penetration enhancers and their uses are further described in U.S. Pat. No. 6,287,860, which is incorporated herein in its entirety.

[0094] One of skill in the art will recognize that formulations are routinely designed according to their intended use, i.e. route of administration.

[0095] Preferred formulations for topical administration include those in which the oligonucleotides of the invention are in admixture with a topical delivery agent such as lipids, liposomes, fatty acids, fatty acid esters, steroids, chelating agents and surfactants. Preferred lipids and liposomes include neutral (e.g. dioleoylphosphatidyl DOPE ethanolamine, dimyristoylphosphatidyl choline DMPC, distearolyphosphatidyl choline) negative (e.g. dimyristoylphosphatidyl glycerol DMPG) and cationic (e.g. dioleoyltetramethylaminopropyl DOTAP and dioleoylphosphatidyl ethanolamine DOTMA).

[0096] For topical or other administration, oligonucleotides of the invention may be encapsulated within liposomes or may form complexes thereto, in particular to cationic liposomes. Alternatively, oligonucleotides may be complexed to lipids, in particular to cationic lipids. Preferred fatty acids and esters, pharmaceutically acceptable salts thereof, and their uses are further described in U.S. Pat. No. 6,287,860, which is incorporated herein in its entirety. Topical formulations are described in detail in U.S. patent application Ser. No. 09/315,298 filed on May 20, 1999, which is incorporated herein by reference in its entirety.

[0097] Compositions and formulations for oral administration include powders or granules, microparticulates, nanoparticulates, suspensions or solutions in water or non-aqueous media, capsules, gel capsules, sachets, tablets or minitablets. Thickeners, flavoring agents, diluents, emulsifiers, dispersing aids or binders may be desirable. Preferred oral formulations are those in which oligonucleotides of the invention are administered in conjunction with one or more penetration enhancers surfactants and chelators. Preferred surfactants include fatty acids and/or esters or salts thereof, bile acids and/or salts thereof. Preferred bile acids/salts and fatty acids and their uses are further described in U.S. Pat. No. 6,287,860, which is incorporated herein in its entirety. Also preferred are combinations of penetration enhancers, for example, fatty acids/salts in combination with bile acids/salts. A particularly preferred combination is the sodium salt of lauric acid, capric acid and UDCA. Further penetration enhancers include polyoxyethylene-9-lauryl ether, polyoxyethylene-20-cetyl ether. Oligonucleotides of the invention may be delivered orally, in granular form including sprayed dried particles, or complexed to form micro or nanoparticles. Oligonucleotide complexing agents and their uses are further described in U.S. Pat. No. 6,287,860, which is incorporated herein in its entirety. Oral formulations for oligonucleotides and their preparation are described in detail in U.S. application Ser. No. 09/108,673 (filed Jul. 1, 1998), Ser. No. 09/315,298 (filed May 20, 1999) and Ser. No. 10/071,822, filed Feb. 8, 2002, each of which is incorporated herein by reference in their entirety.

[0098] Compositions and formulations for parenteral, intrathecal or intraventricular administration may include sterile aqueous solutions which may also contain buffers, diluents and other suitable additives such as, but not limited to, penetration enhancers, carrier compounds and other pharmaceutically acceptable carriers or excipients.

[0099] Certain embodiments of the invention provide pharmaceutical compositions containing one or more oligomeric compounds and one or more other chemotherapeutic agents which function by a non-antisense mechanism. Examples of such chemotherapeutic agents include but are not limited to cancer chemotherapeutic drugs such as daunorubicin, daunomycin, dactinomycin, doxorubicin, epirubicin, idarubicin, esorubicin, bleomycin, mafosfamide, ifosfamide, cytosine arabinoside, bis-chloroethylnitrosurea, busulfan, mitomycin C, actinomycin D, mithramycin, prednisone, hydroxyprogesterone, testosterone, tamoxifen, dacarbazine, procarbazine, hexamethylmelamine, pentamethylmelamine, mitoxantrone, amsacrine, chlorambucil, methylcyclohexylnitrosurea, nitrogen mustards, melphalan, cyclophosphamide, 6-mercaptopurine, 6-thioguanine, cytarabine, 5-azacytidine, hydroxyurea, deoxycoformycin, 4-hydroxyperoxycyclophosphoramide, 5-fluorouracil (5-FU), 5-fluorodeoxyuridine (5-FUdR), methotrexate (MTX), colchicine, taxol, vincristine, vinblastine, etoposide (VP-16), trimetrexate, irinotecan, topotecan, gemcitabine, teniposide, cisplatin and diethylstilbestrol (DES). When used with the compounds of the invention, such chemotherapeutic agents may be used individually (e.g., 5-FU and oligonucleotide), sequentially (e.g., 5-FU and oligonucleotide for a period of time followed by MTX and oligonucleotide), or in combination with one or more other such chemotherapeutic agents (e.g., 5-FU, MTX and oligonucleotide, or 5-FU, radiotherapy and oligonucleotide). Anti-inflammatory drugs, including but not limited to nonsteroidal anti-inflammatory drugs and corticosteroids, and antiviral drugs, including but not limited to ribivirin, vidarabine, acyclovir and ganciclovir, may also be combined in compositions of the invention. Combinations of antisense compounds and other non-antisense drugs are also within the scope of this invention. Two or more combined compounds may be used together or sequentially.

[0100] In another related embodiment, compositions of the invention may contain one or more antisense compounds, particularly oligonucleotides, targeted to a first nucleic acid and one or more additional antisense compounds targeted to a second nucleic acid target. Alternatively, compositions of the invention may contain two or more antisense compounds targeted to different regions of the same nucleic acid target. Numerous examples of antisense compounds are known in the art. Two or more combined compounds may be used together or sequentially.

H. Dosing

[0101] The formulation of therapeutic compositions and their subsequent administration (dosing) is believed to be within the skill of those in the art. Dosing is dependent on severity and responsiveness of the disease state to be treated, with the course of treatment lasting from several days to several months, or until a cure is effected or a diminution of the disease state is achieved. Optimal dosing schedules can be calculated from measurements of drug accumulation in the body of the patient. Persons of ordinary skill can easily determine optimum dosages, dosing methodologies and repetition rates. Optimum dosages may vary depending on the relative potency of individual oligonucleotides, and can generally be estimated based on EC₅₀s found to be effective in in vitro and in vivo animal models. In general, dosage is from 0.01 ug to 100 g per kg of body weight, and may be given once or more daily, weekly, monthly or yearly, or even once every 2 to 20 years. Persons of ordinary skill in the art can easily estimate repetition rates for dosing based on measured residence times and concentrations of the drug in bodily fluids or tissues. Following successful treatment, it may be desirable to have the patient undergo maintenance therapy to prevent the recurrence of the disease state, wherein the oligonucleotide is administered in maintenance doses, ranging from 0.01 ug to 100 g per kg of body weight, once or more daily, to once every 20 years.

[0102] While the present invention has been described with specificity in accordance with certain of its preferred embodiments, the following examples serve only to illustrate the invention and are not intended to limit the same.

### EXAMPLES

### Example 1

Synthesis of Nucleoside Phosphoramidites

[0103] The following compounds, including amidites and their intermediates were prepared as described in U.S. Pat. No. 6,426,220 and published PCT WO 02/36743; 5′-O-Dimethoxytrityl-thymidine intermediate for 5-methyl dC amidite, 5′-O-Dimethoxytrityl-2′-deoxy-5-methylcytidine intermediate for 5-methyl-dC amidite, 5′-O-Dimethoxytrityl-2′-deoxy-N-4-benzoyl-5-methylcytidine penultimate intermediate for 5-methyl dC amidite, [5′-O-(4,4′-Dimethoxytriphenylmethyl)-2′-deoxy-N⁴-benzoyl-5-methylcytidin-3′-O-yl]-2-cyanoethyl-N,N-diisopropylphosphoramidite (5-methyl dC amidite), 2′-Fluorodeoxyadenosine, 2′-Fluorodeoxyguanosine, 2′-Fluorouridine, 2′-Fluorodeoxycytidine, 2′-O-(2-Methoxyethyl) modified amidites, 2′-O-(2-methoxyethyl)-5-methyluridine intermediate, 5′-O-DMT-2′-O-(2-methoxyethyl)-5-methyluridine penultimate intermediate, [5′-O-(4,4′-Dimethoxytriphenylmethyl)-2′-O-(2-methoxyethyl)-5-methyluridin-3′-O-yl]-2-cyanoethyl-N,N-, diisopropylphosphoramidite (MOE T amidite), 5′-O-Dimethoxytrityl-2′-O-(2-methoxyethyl)-5-methylcytidine intermediate, 5′-O-dimethoxytrityl-2′-O-(2-methoxyethyl)-N-4-benzoyl-5-methyl-cytidine penultimate intermediate, [5′-O-(4,4′-Dimethoxytriphenylmethyl)-2′-O-(2-methoxyethyl)-N-benzoyl-5-methylcytidin-3′-O-yl]-2-cyanoethyl-N,N-diisopropylphosphoramidite (MOE 5-Me-C amidite), [5′-O-(4,4′-Dimethoxytriphenylmethyl)-2′-O-(2-methoxyethyl)-N-benzoyladenosin-3′-O-yl]-2-cyanoethyl-N,N-diisopropylphosphoramidite (MOE A amdite), [5′-O-(4,4′-Dimethoxytriphenylmethyl)-2′-O-(2-methoxyethyl)-N-isobutyrylguanosin-3′-O-yl]-2-cyanoethyl-N,N-diisopropylphosphoramidite (MOE G amidite), 2′-O-(Aminooxyethyl) nucleoside amidites and 2′-O-(dimethylamino-oxyethyl) nucleoside amidites, 2′-(Dimethylaminooxyethoxy) nucleoside amidites, 5′-O-tert-Butyldiphenylsilyl-O²-2′-anhydro-5-methyluridine, 5′-O-tert-Butyldiphenylsilyl-2′-O-(2-hydroxyethyl)-5-methyluridine, 2′-O-([2-phthalimidoxy)ethyl]-5′-t-butyldiphenylsilyl-5-methyluridine, 5′-O-tert-butyldiphenylsilyl-2′-O-[(2-formadoximinooxy)ethyl]-5-methyluridine, 5′-O-tert-Butyldiphenylsilyl-2′-O-[N,N dimethylaminooxyethyl]-5-methyluridine, 2′-O-(dimethylaminooxyethyl)-5-methyluridine, 5′-O-DMT-2′-O-(dimethylaminooxyethyl)-5-methyluridine, 5′-O-DMT-2′-O-(2-N,N-dimethylaminooxyethyl)-5-methyluridine-3′-[(2-cyanoethyl)-N,N-diisopropylphosphoramidite], 2′-(Aminooxyethoxy) nucleoside amidites, N2-isobutyryl-6-O-diphenylcarbamoyl-2′-O-(2-ethylacetyl)-5′-O-(4,4′-dimethoxytrityl)guanosine-3′-[(2-cyanoethyl)-N,N-diisopropylphosphoramidite], 2′-dimethylaminoethoxyethoxy (2′-DMAEOE) nucleoside amidites, 2′-O-[2(2-N,N-dimethylaminoethoxy)ethyl]-5-methyl uridine, 5′-O-dimethoxytrityl-2′-O-[2(2-N,N-dimethylaminoethoxy)-ethyl)]-5-methyl uridine and 5′-O-Dimethoxytrityl-2′-O-[2(2-N,N-dimethylaminoethoxy)-ethyl)]-5-methyl uridine-3′-O-(cyanoethyl-N,N-diisopropyl)phosphoramidite.

### Example 2

Oligonucleotide and Oligonucleoside Synthesis

[0104] The antisense compounds used in accordance with this invention may be conveniently and routinely made through the well-known technique of solid phase synthesis. Equipment for such synthesis is sold by several vendors including, for example, Applied Biosystems (Foster City, Calif.). Any other means for such synthesis known in the art may additionally or alternatively be employed. It is well known to use similar techniques to prepare oligonucleotides such as the phosphorothioates and alkylated derivatives.
[0105] Oligonucleotides: Unsubstituted and substituted phosphodiester (P═O) oligonucleotides are synthesized on an automated DNA synthesizer (Applied Biosystems model 394) using standard phosphoramidite chemistry with oxidation by iodine.

[0106] Phosphorothioates (P═S) are synthesized similar to phosphodiester oligonucleotides with the following exceptions: thiation was effected by utilizing a 10% w/v solution of 3,H-1,2-benzodithiole-3-one 1,1-dioxide in acetonitrile for the oxidation of the phosphite linkages. The thiation reaction step time was increased to 180 sec and preceded by the normal capping step. After cleavage from the CPG column and deblocking in concentrated ammonium hydroxide at 55° C. (12-16 hr), the oligonucleotides were recovered by precipitating with >3 volumes of ethanol from a 1 M NH₄OAc solution. Phosphinate oligonucleotides are prepared as described in U.S. Pat. No. 5,508,270, herein incorporated by reference.

[0107] Alkyl phosphonate oligonucleotides are prepared as described in U.S. Pat. No. 4,469,863, herein incorporated by reference.

[0108] 3′-Deoxy-3′-methylene phosphonate oligonucleotides are prepared as described in U.S. Pat. No. 5,610,289 or 5,625,050, herein incorporated by reference.

[0109] Phosphoramidite oligonucleotides are prepared as described in U.S. Pat. No. 5,256,775 or U.S. Pat. No. 5,366,878, herein incorporated by reference.

[0110] Alkylphosphonothioate oligonucleotides are prepared as described in published PCT applications PCT/US94/00902 and PCT/US93/06976 (published as WO 94/17093 and WO 94/02499, respectively), herein incorporated by reference.

[0111] 3′-Deoxy-3′-amino phosphoramidate oligonucleotides are prepared as described in U.S. Pat. No. 5,476,925, herein incorporated by reference.

[0112] Phosphotriester oligonucleotides are prepared as described in U.S. Pat. No. 5,023,243, herein incorporated by reference.

[0113] Borano phosphate oligonucleotides are prepared as described in U.S. Pat. Nos. 5,130,302 and 5,177,198, both herein incorporated by reference.

[0114] Oligonucleosides: Methylenemethylimino linked oligonucleosides, also identified as MMI linked oligonucleosides, methylenedimethylhydrazo linked oligonucleosides, also identified as MDH linked oligonucleosides, and methylenecarbonylamino linked oligonucleosides, also identified as amide-3 linked oligonucleosides, and methyleneaminocarbonyl linked oligo-nucleosides, also identified as amide-4 linked oligonucleosides, as well as mixed backbone compounds having, for instance, alternating MMI and P═O or P═S linkages are prepared as described in U.S. Pat. Nos. 5,378,825, 5,386,023, 5,489,677, 5,602,240 and 5,610,289, all of which are herein incorporated by reference.

[0115] Formacetal and thioformacetal linked oligonucleosides are prepared as described in U.S. Pat. Nos. 5,264,562 and 5,264,564, herein incorporated by reference.

[0116] Ethylene oxide linked oligonucleosides are prepared as described in U.S. Pat. No. 5,223,618, herein incorporated by reference.

### Example 3

RNA Synthesis

[0117] In general, RNA synthesis chemistry is based on the selective incorporation of various protecting groups at strategic intermediary reactions. Although one of ordinary skill in the art will understand the use of protecting groups in organic synthesis, a useful class of protecting groups includes silyl ethers. In particular bulky silyl ethers are used to protect the 5′-hydroxyl in combination with an acid-labile orthoester protecting group on the 2′-hydroxyl. This set of protecting groups is then used with standard solid-phase synthesis technology. It is important to lastly remove the acid labile orthoester protecting group after all other synthetic steps. Moreover, the early use of the silyl protecting groups during synthesis ensures facile removal when desired, without undesired deprotection of 2′ hydroxyl.

[0118] Following this procedure for the sequential protection of the 5′-hydroxyl in combination with protection of the 2′-hydroxyl by protecting groups that are differentially removed and are differentially chemically labile, RNA oligonucleotides were synthesized.

[0119] RNA oligonucleotides are synthesized in a stepwise fashion. Each nucleotide is added sequentially (3′- to 5′-direction) to a solid support-bound oligonucleotide. The first nucleoside at the 3′-end of the chain is covalently attached to a solid support. The nucleotide precursor, a ribonucleoside phosphoramidite, and activator are added, coupling the second base onto the 5′-end of the first nucleoside. The support is washed and any unreacted 5′-hydroxyl groups are capped with acetic anhydride to yield 5′-acetyl moieties. The linkage is then oxidized to the more stable and ultimately desired P(V) linkage. At the end of the nucleotide addition cycle, the 5′-silyl group is cleaved with fluoride. The cycle is repeated for each subsequent nucleotide.

[0120] Following synthesis, the methyl protecting groups on the phosphates are cleaved in 30 minutes utilizing 1 M disodium-2-carbamoyl-2-cyanoethylene-1,1-dithiolate trihydrate (S₂Na₂) in DMF. The deprotection solution is washed from the solid support-bound oligonucleotide using water. The support is then treated with 40% methylamine in water for 10 minutes at 55° C. This releases the RNA oligonucleotides into solution, deprotects the exocyclic amines, and modifies the 2′-groups. The oligonucleotides can be analyzed by anion exchange HPLC at this stage.

[0121] The 2′-orthoester groups are the last protecting groups to be removed. The ethylene glycol monoacetate orthoester protecting group developed by Dharmacon Research, Inc. (Lafayette, Colo.), is one example of a useful orthoester protecting group which, has the following important properties. It is stable to the conditions of nucleoside phosphoramidite synthesis and oligonucleotide synthesis. However, after oligonucleotide synthesis the oligonucleotide is treated with methylamine which not only cleaves the oligonucleotide from the solid support but also removes the acetyl groups from the orthoesters. The resulting 2-ethyl-hydroxyl substituents on the orthoester are less electron withdrawing than the acetylated precursor. As a result, the modified orthoester becomes more labile to acid-catalyzed hydrolysis. Specifically, the rate of cleavage is approximately 10 times faster after the acetyl groups are removed. Therefore, this orthoester possesses sufficient stability in order to be compatible with oligonucleotide synthesis and yet, when subsequently modified, permits deprotection to be carried out under relatively mild aqueous conditions compatible with the final RNA oligonucleotide product.

[0122] Additionally, methods of RNA synthesis are well known in the art (Scaringe, S. A. Ph.D. Thesis, University of Colorado, 1996; Scaringe, S. A., et al., J. Am. Chem. Soc., 1998, 120, 11820-11821; Matteucci, M. D. and Caruthers, M. H. J. Am. Chem. Soc., 1981, 103, 3185-3191; Beaucage, S. L. and Caruthers, M. H. Tetrahedron Lett., 1981, 22, 1859-1862; Dahl, B. J., et al., Acta Chem. Scand, 1990, 44, 639-641; Reddy, M. P., et al., Tetrahedrom Lett., 1994, 25, 4311-4314; Wincott, F. et al., Nucleic Acids Res., 1995, 23, 2677-2684; Griffin, B. E., et al., Tetrahedron, 1967, 23, 2301-2313; Griffin, B. E., et al., Tetrahedron, 1967, 23, 2315-2331).

[0123] RNA antisense compounds (RNA oligonucleotides) of the present invention can be synthesized by the methods herein or purchased from Dharmacon Research, Inc (Lafayette, Colo.). Once synthesized, complementary RNA antisense compounds can then be annealed by methods known in the art to form double stranded (duplexed) antisense compounds. For example, duplexes can be formed by combining 30 μl of each of the complementary strands of RNA oligonucleotides (50 uM RNA oligonucleotide solution) and 15 μl of 5× annealing buffer (100 mM potassium acetate, 30 mM HEPES-KOH pH 7.4, 2 mM magnesium acetate) followed by heating for 1 minute at 90° C., then 1 hour at 37° C. The resulting duplexed antisense compounds can be used in kits, assays, screens, or other methods to investigate the role of a target nucleic acid.

### Example 4

Synthesis of Chimeric Oligonucleotides

[0124] Chimeric oligonucleotides, oligonucleosides or mixed oligonucleotides/oligonucleosides of the invention can be of several different types. These include a first type wherein the “gap” segment of linked nucleosides is positioned between 5′ and 3′ “wing” segments of linked nucleosides and a second “open end” type wherein the “gap” segment is located at either the 3′ or the 5′ terminus of the oligomeric compound. Oligonucleotides of the first type are also known in the art as “gapmers” or gapped oligonucleotides. Oligonucleotides of the second type are also known in the art as “hemimers” or “wingmers”.

### [2′-O-Me]-[2′-deoxy]-[2′-O-Me] Chimeric Phosphorothioate Oligonucleotides

[0125] Chimeric oligonucleotides having 2′-O-alkyl phosphorothioate and 2′-deoxy phosphorothioate oligo-nucleotide segments are synthesized using an Applied Biosystems automated DNA synthesizer Model 394, as above. Oligonucleotides are synthesized using the automated synthesizer and 2′-deoxy-5′-dimethoxytrityl-3′-O-phosphoramidite for the DNA portion and 5′-dimethoxytrityl-2′-O-methyl-3′-O-phosphoramidite for 5′ and 3′ wings. The standard synthesis cycle is modified by incorporating coupling steps with increased reaction times for the 5′-dimethoxytrityl-2′-O-methyl-3′-O-phosphoramidite. The fully protected oligonucleotide is cleaved from the support and deprotected in concentrated ammonia (NH₄OH) for 12-16 hr at 55° C. The deprotected oligo is then recovered by an appropriate method (precipitation, column chromatography, volume reduced in vacuo and analyzed spetrophotometrically for yield and for purity by capillary electrophoresis and by mass spectrometry.

### [2′-O-(2-Methoxyethyl)]-[2′-deoxy]-[2′-O-(Methoxyethyl)] Chimeric Phosphorothioate Oligonucleotides

[0126] [2′-O-(2-methoxyethyl)]-[2′-deoxy]-[-2′-O-methoxyethyl)] chimeric phosphorothioate oligonucleotides were prepared as per the procedure above for the 2′-O-methyl chimeric oligonucleotide, with the substitution of 2′-O-(methoxyethyl) amidites for the 2′-O-methyl amidites.

### [2′-O-(2-Methoxyethyl)Phosphodiester]-[2′-deoxy Phosphorothioate]-[2′-O-(2-Methoxyethyl) Phosphodiester] Chimeric Oligonucleotides

[0127] [2′-O-(2-methoxyethyl phosphodiester]-[2′-deoxy phosphorothioate]-[2′-O-(methoxyethyl) phosphodiester] chimeric oligonucleotides are prepared as per the above procedure for the 2′-O-methyl chimeric oligonucleotide with the substitution of 2′-O-(methoxyethyl) amidites for the 2′-O-methyl amidites, oxidation with iodine to generate the phosphodiester internucleotide linkages within the wing portions of the chimeric structures and sulfurization utilizing 3,H-1,2 benzodithiole-3-one 1,1 dioxide (Beaucage Reagent) to generate the phosphorothioate internucleotide linkages for the center gap.

[0128] Other chimeric oligonucleotides, chimeric oligonucleosides and mixed chimeric oligonucleotides/oligonucleosides are synthesized according to U.S. Pat. No. 5,623,065, herein incorporated by reference.

### Example 5

Design and Screening of Duplexed Antisense Compounds Targeting Phosphodiesterase 4B

[0129] In accordance with the present invention, a series of nucleic acid duplexes comprising the antisense compounds of the present invention and their complements can be designed to target phosphodiesterase 4B. The nucleobase sequence of the antisense strand of the duplex comprises at least a portion of an oligonucleotide in Table 1. The ends of the strands may be modified by the addition of one or more natural or modified nucleobases to form an overhang. The sense strand of the dsRNA is then designed and synthesized as the complement of the antisense strand and may also contain modifications or additions to either terminus. For example, in one embodiment, both strands of the dsRNA duplex would be complementary over the central nucleobases, each having overhangs at one or both termini.

[0130] For example, a duplex comprising an antisense strand having the sequence CGAGAGGCGGACGGGACCG and having a two-nucleobase overhang of deoxythymidine (dT) would have the following structure:

| | |
|---|---|
| cgagaggcggacgggaccgTT | Antisense Strand |
| \|\|\|\|\|\|\|\|\|\|\|\|\|\|\|\|\|\|\| | |
| TTgctctccgcctgccctggc | Complement |

[0131] RNA strands of the duplex can be synthesized by methods disclosed herein or purchased from Dharmacon Research Inc., (Lafayette, Colo.). Once synthesized, the complementary strands are annealed. The single strands are aliquoted and diluted to a concentration of 50 uM. Once diluted, 30 uL of each strand is combined with 15uL of a 5× solution of annealing buffer. The final concentration of said buffer is 100 mM potassium acetate, 30 mM HEPES-KOH pH 7.4, and 2 mM magnesium acetate. The final volume is 75 uL. This solution is incubated for 1 minute at 90° C. and then centrifuged for 15 seconds. The tube is allowed to sit for 1 hour at 37° C. at which time the dsRNA duplexes are used in experimentation. The final concentration of the dsRNA duplex is 20 uM. This solution can be stored frozen (−20° C.) and freeze-thawed up to 5 times.

[0132] Once prepared, the duplexed antisense compounds are evaluated for their ability to modulate phosphodiesterase 4B expression.

[0133] When cells reached 80% confluency, they are treated with duplexed antisense compounds of the invention. For cells grown in 96-well plates, wells are washed once with 200 μL OPTI-MEM-1 reduced-serum medium (Gibco BRL) and then treated with 130 μL of OPTI-MEM-1 containing 12 μg/mL LIPOFECTIN (Gibco BRL) and the desired duplex antisense compound at a final concentration of 200 nM. After 5 hours of treatment, the medium is replaced with fresh medium. Cells are harvested 16 hours after treatment, at which time RNA is isolated and target reduction measured by RT-PCR.

### Example 6

Oligonucleotide Isolation

[0134] After cleavage from the controlled pore glass solid support and deblocking in concentrated ammonium hydroxide at 55° C. for 12-16 hours, the oligonucleotides or oligonucleosides are recovered by precipitation out of 1 M NH₄OAc with >3 volumes of ethanol. Synthesized oligonucleotides were analyzed by electrospray mass spectroscopy (molecular weight determination) and by capillary gel electrophoresis and judged to be at least 70% full length material. The relative amounts of phosphorothioate and phosphodiester linkages obtained in the synthesis was determined by the ratio of correct molecular weight relative to the −16 amu product (+/−32+/−48). For some studies oligonucleotides were purified by HPLC, as described by Chiang et al., J. Biol. Chem. 1991, 266, 18162-18171. Results obtained with HPLC-purified material were similar to those obtained with non-HPLC purified material.

### Example 7

Oligonucleotide Synthesis—96 Well Plate Format

[0135] Oligonucleotides were synthesized via solid phase P(III) phosphoramidite chemistry on an automated synthesizer capable of assembling 96 sequences simultaneously in a 96-well format. Phosphodiester internucleotide linkages were afforded by oxidation with aqueous iodine. Phosphorothioate internucleotide linkages were generated by sulfurization utilizing 3,H-1,2 benzodithiole-3-one 1,1 dioxide (Beaucage Reagent) in anhydrous acetonitrile. Standard base-protected beta-cyanoethyl-diiso-propyl phosphoramidites were purchased from commercial vendors (e.g. PE-Applied Biosystems, Foster City, Calif., or Pharmacia, Piscataway, N.J.). Non-standard nucleosides are synthesized as per standard or patented methods. They are utilized as base protected beta-cyanoethyldiisopropyl phosphoramidites.

[0136] Oligonucleotides were cleaved from support and deprotected with concentrated NH₄OH at elevated temperature (55-60° C.) for 12-16 hours and the released product then dried in vacuo. The dried product was then re-suspended in sterile water to afford a master plate from which all analytical and test plate samples are then diluted utilizing robotic pipettors.

### Example 8

Oligonucleotide Analysis—96-Well Plate Format

[0137] The concentration of oligonucleotide in each well was assessed by dilution of samples and UV absorption spectroscopy. The full-length integrity of the individual products was evaluated by capillary electrophoresis (CE) in either the 96-well format (Beckman P/ACE™ MDQ) or, for individually prepared samples, on a commercial CE apparatus (e.g., Beckman P/ACE™ 5000, ABI 270). Base and backbone composition was confirmed by mass analysis of the compounds utilizing electrospray-mass spectroscopy. All assay test plates were diluted from the master plate using single and multi-channel robotic pipettors. Plates were judged to be acceptable if at least 85% of the compounds on the plate were at least 85% full length.

### Example 9

Cell Culture and Oligonucleotide Treatment

[0138] The effect of antisense compounds on target nucleic acid expression can be tested in any of a variety of cell types provided that the target nucleic acid is present at measurable levels. This can be routinely determined using, for example, PCR or Northern blot analysis. The following cell types are provided for illustrative purposes, but other cell types can be routinely used, provided that the target is expressed in the cell type chosen. This can be readily determined by methods routine in the art, for example Northern blot analysis, ribonuclease protection assays, or RT-PCR.

T-24 Cells:

[0139] The human transitional cell bladder carcinoma cell line T-24 was obtained from the American Type Culture Collection (ATCC) (Manassas, Va.). T-24 cells were routinely cultured in complete McCoy's 5A basal media (Invitrogen Corporation, Carlsbad, Calif.) supplemented with 10% fetal calf serum (Invitrogen Corporation, Carlsbad, Calif.), penicillin 100 units per mL, and streptomycin 100 micrograms per mL (Invitrogen Corporation, Carlsbad, Calif.). Cells were routinely passaged by trypsinization and dilution when they reached 90% confluence. Cells were seeded into 96-well plates (Falcon-Primaria #353872) at a density of 7000 cells/well for use in RT-PCR analysis.

[0140] For Northern blotting or other analysis, cells may be seeded onto 100 mm or other standard tissue culture plates and treated similarly, using appropriate volumes of medium and oligonucleotide.

A549 Cells:

[0141] The human lung carcinoma cell line A549 was obtained from the American Type Culture Collection (ATCC) (Manassas, Va.). A549 cells were routinely cultured in DMEM basal media (Invitrogen Corporation, Carlsbad, Calif.) supplemented with 10% fetal calf serum (Invitrogen Corporation, Carlsbad, Calif.), penicillin 100 units per mL, and streptomycin 100 micrograms per mL (Invitrogen Corporation, Carlsbad, Calif.). Cells were routinely passaged by trypsinization and dilution when they reached 90% confluence.

NHDF Cells:

[0142] Human neonatal dermal fibroblast (NHDF) were obtained from the Clonetics Corporation (Walkersville, Md.). NHDFs were routinely maintained in Fibroblast Growth Medium (Clonetics Corporation, Walkersville, Md.) supplemented as recommended by the supplier. Cells were maintained for up to 10 passages as recommended by the supplier.

HEK Cells:

[0143] Human embryonic keratinocytes (HEK) were obtained from the Clonetics Corporation (Walkersville, Md.). HEKs were routinely maintained in Keratinocyte Growth Medium (Clonetics Corporation, Walkersville, Md.) formulated as recommended by the supplier. Cells were routinely maintained for up to 10 passages as recommended by the supplier.

HuVEC Cells:

[0144] The human umbilical vein endothilial cell line HuVEC was obtained from the American Type Culture Collection (Manassas, Va.). HuVEC cells were routinely cultured in EBM (Clonetics Corporation Walkersville, Md.) supplemented with SingleQuots supplements (Clonetics Corporation, Walkersville, Md.). Cells were routinely passaged by trypsinization and dilution when they reached 90% confluence were maintained for up to 15 passages. Cells were seeded into 96-well plates (Falcon-Primaria #3872) at a density of 10000 cells/well for use in RT-PCR analysis.

[0145] For Northern blotting or other analyses, cells may be seeded onto 100 mm or other standard tissue culture plates and treated similarly, using appropriate volumes of medium and oligonucleotide.

Treatment with Antisense Compounds:

[0146] When cells reached 65-75% confluency, they were treated with oligonucleotide. For cells grown in 96-well plates, wells were washed once with 100 μL OPTI-MEM™-1 reduced-serum medium (Invitrogen Corporation, Carlsbad, Calif.) and then treated with 130 μL of OPTI-MEM™-1 containing 3.75 μg/mL LIPOFECTIN™ (Invitrogen Corporation, Carlsbad, Calif.) and the desired concentration of oligonucleotide. Cells are treated and data are obtained in triplicate. After 4-7 hours of treatment at 37° C., the medium was replaced with fresh medium. Cells were harvested 16-24 hours after oligonucleotide treatment.

[0147] The concentration of oligonucleotide used varies from cell line to cell line. To determine the optimal oligonucleotide concentration for a particular cell line, the cells are treated with a positive control oligonucleotide at a range of concentrations. For human cells the positive control oligonucleotide is selected from either ISIS 13920 (TCCGTCATCGCTCCTCAGGG, SEQ ID NO: 1) which is targeted to human H-ras, or ISIS 18078, (GTGCGCGCGAGCCCGAAATC, SEQ ID NO: 2) which is targeted to human Jun-N-terminal kinase-2 (JNK2). Both controls are 2′-O-methoxyethyl gapmers (2′-O-methoxyethyls shown in bold) with a phosphorothioate backbone. For mouse or rat cells the positive control oligonucleotide is ISIS 15770, ATGCATTCTGCCCCCAAGGA, SEQ ID NO: 3, a 2′-O-methoxyethyl gapmer (2′-O-methoxyethyls shown in bold) with a phosphorothioate backbone which is targeted to both mouse and rat c-raf. The concentration of positive control oligonucleotide that results in 80% inhibition of c-H-ras (for ISIS 13920), JNK2 (for ISIS 18078) or c-raf (for ISIS 15770) mRNA is then utilized as the screening concentration for new oligonucleotides in subsequent experiments for that cell line. If 80% inhibition is not achieved, the lowest concentration of positive control oligonucleotide that results in 60% inhibition of c-H-ras, JNK2 or c-raf mRNA is then utilized as the oligonucleotide screening concentration in subsequent experiments for that cell line. If 60% inhibition is not achieved, that particular cell line is deemed as unsuitable for oligonucleotide transfection experiments. The concentrations of antisense oligonucleotides used herein are from 50 nM to 300 nM.

### Example 10

Analysis of Oligonucleotide Inhibition of Phosphodiesterase 4B Expression

[0148] Antisense modulation of phosphodiesterase 4B expression can be assayed in a variety of ways known in the art. For example, phosphodiesterase 4B mRNA levels can be quantitated by, e.g., Northern blot analysis, competitive polymerase chain reaction (PCR), or real-time PCR (RT-PCR). Real-time quantitative PCR is presently preferred. RNA analysis can be performed on total cellular RNA or poly(A)+ mRNA. The preferred method of RNA analysis of the present invention is the use of total cellular RNA as described in other examples herein. Methods of RNA isolation are well known in the art. Northern blot analysis is also routine in the art. Real-time quantitative (PCR) can be conveniently accomplished using the commercially available ABI PRISM™ 7600, 7700, or 7900 Sequence Detection System, available from PE-Applied Biosystems, Foster City, Calif. and used according to manufacturer's instructions.

[0149] Protein levels of phosphodiesterase 4B can be quantitated in a variety of ways well known in the art, such as immunoprecipitation, Western blot analysis (immunoblotting), enzyme-linked immunosorbent assay (ELISA) or fluorescence-activated cell sorting (FACS). Antibodies directed to phosphodiesterase 4B can be identified and obtained from a variety of sources, such as the MSRS catalog of antibodies (Aerie Corporation, Birmingham, Mich.), or can be prepared via conventional monoclonal or polyclonal antibody generation methods well known in the art.

### Example 11

Design of Phenotypic Assays and In Vivo Studies for the Use of Phosphodiesterase 4B Inhibitors

Phenotypic Assays

[0150] Once phosphodiesterase 4B inhibitors have been identified by the methods disclosed herein, the compounds are further investigated in one or more phenotypic assays, each having measurable endpoints predictive of efficacy in the treatment of a particular disease state or condition. Phenotypic assays, kits and reagents for their use are well known to those skilled in the art and are herein used to investigate the role and/or association of phosphodiesterase 4B in health and disease. Representative phenotypic assays, which can be purchased from any one of several commercial vendors, include those for determining cell viability, cytotoxicity, proliferation or cell survival (Molecular Probes, Eugene, Oreg.; PerkinElmer, Boston, Mass.), protein-based assays including enzymatic assays (Panvera, LLC, Madison, Wis.; BD Biosciences, Franklin Lakes, N.J.; Oncogene Research Products, San Diego, Calif.), cell regulation, signal transduction, inflammation, oxidative processes and apoptosis (Assay Designs Inc., Ann Arbor, Mich.), triglyceride accumulation (Sigma-Aldrich, St. Louis, Mo.), angiogenesis assays, tube formation assays, cytokine and hormone assays and metabolic assays (Chemicon International Inc., Temecula, Calif.; Amersham Biosciences, Piscataway, N.J.).

[0151] In one non-limiting example, cells determined to be appropriate for a particular phenotypic assay (i.e., MCF-7 cells selected for breast cancer studies; adipocytes for obesity studies) are treated with phosphodiesterase 4B inhibitors identified from the in vitro studies as well as control compounds at optimal concentrations which are determined by the methods described above. At the end of the treatment period, treated and untreated cells are analyzed by one or more methods specific for the assay to determine phenotypic outcomes and endpoints.

[0152] Phenotypic endpoints include changes in cell morphology over time or treatment dose as well as changes in levels of cellular components such as proteins, lipids, nucleic acids, hormones, saccharides or metals. Measurements of cellular status which include pH, stage of the cell cycle, intake or excretion of biological indicators by the cell, are also endpoints of interest.

[0153] Analysis of the geneotype of the cell (measurement of the expression of one or more of the genes of the cell) after treatment is also used as an indicator of the efficacy or potency of the phosphodiesterase 4B inhibitors. Hallmark genes, or those genes suspected to be associated with a specific disease state, condition, or phenotype, are measured in both treated and untreated cells.

In Vivo Studies

[0154] The individual subjects of the in vivo studies described herein are warm-blooded vertebrate animals, which includes humans.

[0155] The clinical trial is subjected to rigorous controls to ensure that individuals are not unnecessarily put at risk and that they are fully informed about their role in the study. To account for the psychological effects of receiving treatments, volunteers are randomly given placebo or phosphodiesterase 4B inhibitor. Furthermore, to prevent the doctors from being biased in treatments, they are not informed as to whether the medication they are administering is a phosphodiesterase 4B inhibitor or a placebo. Using this randomization approach, each volunteer has the same chance of being given either the new treatment or the placebo.

[0156] Volunteers receive either the phosphodiesterase 4B inhibitor or placebo for eight week period with biological parameters associated with the indicated disease state or condition being measured at the beginning (baseline measurements before any treatment), end (after the final treatment), and at regular intervals during the study period. Such measurements include the levels of nucleic acid molecules encoding phosphodiesterase 4B or phosphodiesterase 4B protein levels in body fluids, tissues or organs compared to pre-treatment levels. Other measurements include, but are not limited to, indices of the disease state or condition being treated, body weight, blood pressure, serum titers of pharmacologic indicators of disease or toxicity as well as ADME (absorption, distribution, metabolism and excretion) measurements.

[0157] Information recorded for each patient includes age (years), gender, height (cm), family history of disease state or condition (yes/no), motivation rating (some/moderate/great) and number and type of previous treatment regimens for the indicated disease or condition.

[0158] Volunteers taking part in this study are healthy adults (age 18 to 65 years) and roughly an equal number of males and females participate in the study. Volunteers with certain characteristics are equally distributed for placebo and phosphodiesterase 4B inhibitor treatment. In general, the volunteers treated with placebo have little or no response to treatment, whereas the volunteers treated with the phosphodiesterase 4B inhibitor show positive trends in their disease state or condition index at the conclusion of the study.

### Example 12

RNA Isolation

Poly(A)+ mRNA Isolation

[0159] Poly(A)+ mRNA was isolated according to Miura et al., (Clin. Chem., 1996, 42, 1758-1764). Other methods for poly(A)+ mRNA isolation are routine in the art. Briefly, for cells grown on 96-well plates, growth medium was removed from the cells and each well was washed with 200 μL cold PBS. 60 μL lysis buffer (10 mM Tris-HCl, pH 7.6, 1 mM EDTA, 0.5 M NaCl, 0.5% NP-40, 20 mM vanadyl-ribonucleoside complex) was added to each well, the plate was gently agitated and then incubated at room temperature for five minutes. 55 μL of lysate was transferred to Oligo d(T) coated 96-well plates (AGCT Inc., Irvine Calif.). Plates were incubated for 60 minutes at room temperature, washed 3 times with 200 μL of wash buffer (10 mM Tris-HCl pH 7.6, 1 mM EDTA, 0.3 M NaCl). After the final wash, the plate was blotted on paper towels to remove excess wash buffer and then air-dried for 5 minutes. 60 μL of elution buffer (5 mM Tris-HCl pH 7.6), preheated to 70° C., was added to each well, the plate was incubated on a 90° C. hot plate for 5 minutes, and the eluate was then transferred to a fresh 96-well plate.

[0160] Cells grown on 100 mm or other standard plates may be treated similarly, using appropriate volumes of all solutions.

Total RNA Isolation

[0161] Total RNA was isolated using an RNEASY 96™ kit and buffers purchased from Qiagen Inc. (Valencia, Calif.) following the manufacturer's recommended procedures. Briefly, for cells grown on 96-well plates, growth medium was removed from the cells and each well was washed with 200 μL cold PBS. 150 μL Buffer RLT was added to each well and the plate vigorously agitated for 20 seconds. 150 μL of 70% ethanol was then added to each well and the contents mixed by pipetting three times up and down. The samples were then transferred to the RNEASY 96™ well plate attached to a QIAVAC™ manifold fitted with a waste collection tray and attached to a vacuum source. Vacuum was applied for 1 minute. 500 μL of Buffer RW1 was added to each well of the RNEASY 96™ plate and incubated for 15 minutes and the vacuum was again applied for 1 minute. An additional 500 μL of Buffer RW1 was added to each well of the RNEASY 96™ plate and the vacuum was applied for 2 minutes. 1 mL of Buffer RPE was then added to each well of the RNEASY 96™ plate and the vacuum applied for a period of 90 seconds. The Buffer RPE wash was then repeated and the vacuum was applied for an additional 3 minutes. The plate was then removed from the QIAVAC™ manifold and blotted dry on paper towels. The plate was then re-attached to the QIAVAC™ manifold fitted with a collection tube rack containing 1.2 mL collection tubes. RNA was then eluted by pipetting 140 μL of RNAse free water into each well, incubating 1 minute, and then applying the vacuum for 3 minutes.

[0162] The repetitive pipetting and elution steps may be automated using a QIAGEN Bio-Robot 9604 (Qiagen, Inc., Valencia Calif.). Essentially, after lysing of the cells on the culture plate, the plate is transferred to the robot deck where the pipetting, DNase treatment and elution steps are carried out.

### Example 13

Real-Time Quantitative PCR Analysis of Phosphodiesterase 4B mRNA Levels

[0163] Quantitation of phosphodiesterase 4B mRNA levels was accomplished by real-time quantitative PCR using the ABI PRISM™ 7600, 7700, or 7900 Sequence Detection System (PE-Applied Biosystems, Foster City, Calif.) according to manufacturer's instructions. This is a closed-tube, non-gel-based, fluorescence detection system which allows high-throughput quantitation of polymerase chain reaction (PCR) products in real-time. As opposed to standard PCR in which amplification products are quantitated after the PCR is completed, products in real-time quantitative PCR are quantitated as they accumulate. This is accomplished by including in the PCR reaction an oligonucleotide probe that anneals specifically between the forward and reverse PCR primers, and contains two fluorescent dyes. A reporter dye (e.g., FAM or JOE, obtained from either PE-Applied Biosystems, Foster City, Calif., Operon Technologies Inc., Alameda, Calif. or Integrated DNA Technologies Inc., Coralville, Iowa) is attached to the 5′ end of the probe and a quencher dye (e.g., TAMRA, obtained from either PE-Applied Biosystems, Foster City, Calif., Operon Technologies Inc., Alameda, Calif. or Integrated DNA Technologies Inc., Coralville, Iowa) is attached to the 3′ end of the probe. When the probe and dyes are intact, reporter dye emission is quenched by the proximity of the 3′ quencher dye. During amplification, annealing of the probe to the target sequence creates a substrate that can be cleaved by the 5′-exonuclease activity of Taq polymerase. During the extension phase of the PCR amplification cycle, cleavage of the probe by Taq polymerase releases the reporter dye from the remainder of the probe (and hence from the quencher moiety) and a sequence-specific fluorescent signal is generated. With each cycle, additional reporter dye molecules are cleaved from their respective probes, and the fluorescence intensity is monitored at regular intervals by laser optics built into the ABI PRISM™ Sequence Detection System. In each assay, a series of parallel reactions containing serial dilutions of mRNA from untreated control samples generates a standard curve that is used to quantitate the percent inhibition after antisense oligonucleotide treatment of test samples.

[0164] Prior to quantitative PCR analysis, primer-probe sets specific to the target gene being measured are evaluated for their ability to be “multiplexed” with a GAPDH amplification reaction. In multiplexing, both the target gene and the internal standard gene GAPDH are amplified concurrently in a single sample. In this analysis, mRNA isolated from untreated cells is serially diluted. Each dilution is amplified in the presence of primer-probe sets specific for GAPDH only, target gene only (“single-plexing”), or both (multiplexing). Following PCR amplification, standard curves of GAPDH and target mRNA signal as a function of dilution are generated from both the single-plexed and multiplexed samples. If both the slope and correlation coefficient of the GAPDH and target signals generated from the multiplexed samples fall within 10% of their corresponding values generated from the single-plexed samples, the primer-probe set specific for that target is deemed multiplexable. Other methods of PCR are also known in the art.

[0165] PCR reagents were obtained from Invitrogen Corporation, (Carlsbad, Calif.). RT-PCR reactions were carried out by adding 20 μL PCR cocktail (2.5×PCR buffer minus MgCl₂, 6.6 mM MgCl₂, 375 μM each of dATP, dCTP, dCTP and dGTP, 375 nM each of forward primer and reverse primer, 125 nM of probe, 4 Units RNAse inhibitor, 1.25 Units PLATINUM®) Taq, 5 Units MuLV reverse transcriptase, and 2.5×ROX dye) to 96-well plates containing 30 μL total RNA solution (20-200 ng). The RT reaction was carried out by incubation for 30 minutes at 48° C. Following a 10 minute incubation at 95° C. to activate the PLATINUM® Taq, 40 cycles of a two-step PCR protocol were carried out: 95° C. for 15 seconds (denaturation) followed by 60° C. for 1.5 minutes (annealing/extension).

[0166] Gene target quantities obtained by real time RT-PCR are normalized using either the expression level of GAPDH, a gene whose expression is constant, or by quantifying total RNA using RiboGreen™ (Molecular Probes, Inc. Eugene, Oreg.). GAPDH expression is quantified by real time RT-PCR, by being run simultaneously with the target, multiplexing, or separately. Total RNA is quantified using RiboGreen™ RNA quantification reagent (Molecular Probes, Inc. Eugene, Oreg.). Methods of RNA quantification by RiboGreen™ are taught in Jones, L. J., et al, (Analytical Biochemistry, 1998, 265, 368-374).

[0167] In this assay, 170 μL of RiboGreen™ working reagent (RiboGreen™ reagent diluted 1:350 in 10 mM Tris-HCl, 1 mM EDTA, pH 7.5) is pipetted into a 96-well plate containing 30 μL purified, cellular RNA. The plate is read in a CytoFluor 4000 (PE Applied Biosystems) with excitation at 485 nm and emission at 530 nm.

[0168] Probes and primers to human phosphodiesterase 4B were designed to hybridize to a human phosphodiesterase 4B sequence, using published sequence information (GenBank accession number NM_{—}002358.2, incorporated herein as SEQ ID NO:4). For human phosphodiesterase 4B the PCR primers were: forward primer: CACATTTTACTTCCTTCCCCTGTT (SEQ ID NO: 5) reverse primer: ACTGTTGGAGGCAGGCAAAC (SEQ ID NO: 6) and the PCR probe was: FAM-TCCAGTCCAACTCCACAGTCACTCTTAAAACTTC-TAMRA (SEQ ID NO: 7) where FAM is the fluorescent dye and TAMRA is the quencher dye. For human GAPDH the PCR primers were: forward primer: GAAGGTGAAGGTCGGAGTC (SEQ ID NO:8) reverse primer: GAAGATGGTGATGGGATTTC (SEQ ID NO:9) and the PCR probe was: 5′ JOE-CAAGCTTCCCGTTCTCAGCC-TAMRA 3′ (SEQ ID NO: 10) where JOE is the fluorescent reporter dye and TAMRA is the quencher dye.

### Example 14

Northern Blot Analysis of Phosphodiesterase 4B mRNA Levels

[0169] Eighteen hours after antisense treatment, cell monolayers were washed twice with cold PBS and lysed in 1 mL RNAZOL™ (TEL-TEST “B” Inc., Friendswood, Tex.). Total RNA was prepared following manufacturer's recommended protocols. Twenty micrograms of total RNA was fractionated by electrophoresis through 1.2% agarose gels containing 1.1% formaldehyde using a MOPS buffer system (AMRESCO, Inc. Solon, Ohio). RNA was transferred from the gel to HYBOND™-N+ nylon membranes (Amersham Pharmacia Biotech, Piscataway, N.J.) by overnight capillary transfer using a Northern/Southern Transfer buffer system (TEL-TEST “B” Inc., Friendswood, Tex.). RNA transfer was confirmed by UV visualization. Membranes were fixed by UV cross-linking using a STRATALINKER™ UV Crosslinker 2400 (Stratagene, Inc, La Jolla, Calif.) and then probed using QUICKHYB™ hybridization solution (Stratagene, La Jolla, Calif.) using manufacturer's recommendations for stringent conditions.

[0170] To detect human phosphodiesterase 4B, a human phosphodiesterase 4B specific probe was prepared by PCR using the forward primer GAAAGTGGTGAGGTCCTGGAAA (SEQ ID NO: 5) and the reverse primer TGGGTGCACTGTCATCTTTTG (SEQ ID NO: 6). To normalize for variations in loading and transfer efficiency membranes were stripped and probed for human glyceraldehyde-3-phosphate dehydrogenase (GAPDH) RNA (Clontech, Palo Alto, Calif.).

[0171] Hybridized membranes were visualized and quantitated using a PHOSPHORIMAGER™ and IMAGEQUANT™ Software V3.3 (Molecular Dynamics, Sunnyvale, Calif.). Data was normalized to GAPDH levels in untreated controls.

### Example 15

Antisense Inhibition of Human Phosphodiesterase 4B Expression by Chimeric Phosphorothioate Oligonucleotides having 2′-MOE Wings and a Deoxy Gap

[0172] In accordance with the present invention, a series of antisense compounds were designed to target different regions of the human phosphodiesterase 4B RNA, using published sequences (GenBank accession number NM_{—}002358.2, incorporated herein as SEQ ID NO: 4). The compounds are shown in Table 1. “Target site” indicates the first (5′-most) nucleotide number on the particular target sequence to which the compound binds. All compounds in Table 1 are chimeric oligonucleotides (“gapmers”) 20 nucleotides in length, composed of a central “gap” region consisting of ten 2′-deoxynucleotides, which is flanked on both sides (5′ and 3′ directions) by five-nucleotide “wings”. The wings are composed of 2′-methoxyethyl (2′-MOE) nucleotides. The internucleoside (backbone) linkages are phosphorothioate (P═S) throughout the oligonucleotide. All cytidine residues are 5-methylcytidines. The compounds were analyzed for their effect on human phosphodiesterase 4B mRNA levels by quantitative real-time PCR as described in other examples herein. Data are averages from three experiments in which HuVEC cells were treated with the oligonucleotides of the present invention. The positive control for each datapoint is identified in the table by sequence ID number. If present, “N.D.” indicates “no data”.

TABLE 1

Inhibition of human phosphodiesterase 4B mRNA levels by
chimeric phosphorothioate oligonucleotides having 2′-MOE
wings and a deoxy gap

| | | | |
|---|---|---|---|
| TARGET | | | CONTROL |
| SEQ ID | TARGET | SEQ ID | SEQ ID |

| | | | | | | | |
|---|---|---|---|---|---|---|---|
| ISIS # | REGION | NO | SITE | SEQUENCE | % INHIB | NO | NO |

| | | | | | | | |
|---|---|---|---|---|---|---|---|
| 208801 | Exon | 4 | 596210 | caggaatggaggtgttagcg | 33 | 11 | 1 |
| 208802 | 5′UTR | 4 | 554730 | actctctctgccttagtcat | 7 | 12 | 1 |
| 208803 | 5′UTR | 4 | 554895 | atggctggtgccaagtttcc | 51 | 13 | 1 |
| 208804 | Exon | 4 | 596538 | catttagtatctaatgtgag | 54 | 14 | 1 |
| 208805 | Exon | 4 | 596646 | ataacccaactcatgcccac | 51 | 15 | 1 |
| 208806 | Exon | 4 | 596749 | acctcttcaaagtcagtagt | 47 | 16 | 1 |
| 208807 | 5′UTR | 4 | 554918 | atcacagtggtgctctgcct | 1 | 17 | 1 |
| 208808 | CDS | 4 | 554992 | tgaaggtgcccccgtgctcc | 54 | 18 | 1 |
| 208809 | Intron: | 4 | 555095 | taagattcttctgcaaacaa | 51 | 19 | 1 |
| | exon | | | | | | |
| | junction | | | | | | |
| 208810 | Intron: | 4 | 800 | cctcaggctgccctcgcaga | 44 | 20 | 1 |
| | exon | | | | | | |
| | junction | | | | | | |
| 208812 | Exon | 4 | 120866 | caatgcagtttgctgacact | 36 | 21 | 1 |
| 208813 | Exon | 4 | 120887 | cctcttaggatgtctgttat | 19 | 22 | 1 |
| 208814 | Exon | 4 | 120898 | ggaaaatatcccctcttagg | 45 | 23 | 1 |
| 208815 | Start | 4 | 120919 | gcttttcttcattatagagg | 25 | 24 | 1 |
| | codon | | | | | | |
| 208816 | Exon | 4 | 126248 | gtgttactggaagaactgta | 30 | 25 | 1 |
| 208817 | Exon | 4 | 126358 | taccatctccctcaggagtc | 26 | 26 | 1 |
| 208819 | Intron | 4 | 470143 | ctggctgtgcccaggaaagg | 0 | 27 | 1 |
| 208820 | Intron | 4 | 470148 | ctgcgctggctgtgcccagg | 12 | 28 | 1 |
| 208821 | Intron | 4 | 480393 | acacttcgcaagctggcaag | 50 | 29 | 1 |
| 208823 | Coding | 4 | 584271 | agattcttcttgtgggttga | 61 | 30 | 1 |
| 208824 | Coding | 4 | 584276 | ttatctgggtcatgagctgc | 62 | 31 | 1 |
| 208825 | Coding | 4 | 584281 | tccacttatctgggtcatga | 72 | 32 | 1 |
| 208826 | Coding | 4 | 584286 | ttcactccacttatctgggt | 65 | 33 | 1 |
| 208828 | Coding | 4 | 585766 | tttgttcaggtcttccagct | 35 | 34 | 1 |
| 208830 | Coding | 4 | 586050 | taaagtcatcatgtaggtta | 59 | 35 | 1 |
| 208831 | Coding | 4 | 586055 | tcttctaaagtcatcatgta | 59 | 36 | 1 |
| 208832 | Coding | 4 | 588288 | gctgcaaaaatggcagccag | 0 | 37 | 1 |
| 208833 | Coding | 4 | 588293 | tggcagctgcaaaaatggca | 0 | 38 | 1 |
| 208834 | Coding | 4 | 588298 | atggatggcagctgcaaaaa | 50 | 39 | 1 |
| 208835 | Coding | 4 | 590604 | tgaacttgtaactttcttcg | 64 | 40 | 1 |
| 208836 | Coding | 4 | 594998 | ccagttcctgttatcttcta | 72 | 41 | 1 |
| 208837 | Coding | 4 | 595164 | tctttgtgctgctgaaatag | 65 | 42 | 1 |
| 208838 | Coding | 4 | 595224 | caatgtctatgtcagtctct | 64 | 43 | 1 |
| 208839 | 3′UTR | 4 | 595327 | tgggctggccctaccacata | 68 | 44 | 1 |
| 208840 | 3′UTR | 4 | 595442 | caaccgtgggatttcctgag | 75 | 45 | 1 |
| 208841 | 3′UTR | 4 | 595615 | aaatgaagttattagtcagt | 60 | 46 | 1 |
| 208842 | 3′UTR | 4 | 595657 | gcacacaggttggcagacaa | 74 | 47 | 1 |
| 208843 | 3′UTR | 4 | 595662 | aaaaggcacacaggttggca | 74 | 48 | 1 |
| 208844 | 3′UTR | 4 | 595699 | tcaacaggcattttaaagac | 40 | 49 | 1 |
| 208845 | 3′UTR | 4 | 595954 | tactgttggaggcaggcaaa | 92 | 50 | 1 |
| 208846 | Intron | 4 | 554808 | agggaacggtctcttataag | 17 | 51 | 1 |
| 208847 | Intron: | 4 | 555090 | ttcttctgcaaacaaacaca | 81 | 52 | 1 |
| | exon | | | | | | |
| | junction | | | | | | |
| 208850 | Exon | 4 | 596667 | caatgatagtaggatccagt | 52 | 53 | 1 |
| 208851 | Exon | 4 | 596719 | tcagaagaatcatctgtgag | 64 | 54 | 1 |
| 208852 | Exon | 4 | 597037 | acctgaaacaatgcagtgtt | 55 | 55 | 1 |
| 208855 | Intron: | 4 | 809 | cagcccttacctcaggctgc | 0 | 56 | 1 |
| | exon | | | | | | |
| | junction | | | | | | |
| 208856 | Intron: | 4 | 120847 | tttttaatacctacaggaga | 22 | 57 | 1 |
| | exon | | | | | | |
| | junction | | | | | | |
| 208857 | Intron: | 4 | 200745 | cttatcttaccatgtatgag | 31 | 58 | 1 |
| | exon | | | | | | |
| | junction | | | | | | |
| 208858 | Intron | 4 | 302142 | tgcacagtagcaatatcata | 23 | 59 | 1 |
| 208859 | Intron | 4 | 427012 | cagaaatgctataggtatgt | 25 | 60 | 1 |
| 208860 | Intron | 4 | 472293 | ttggaaaatttaggttctaa | 61 | 61 | 1 |
| 208861 | Intron: | 4 | 480271 | taatacatacctgggcaaaa | 24 | 62 | 1 |
| | exon | | | | | | |
| | junction | | | | | | |
| 208862 | Intron: | 4 | 480380 | tggcaaggacctagaagaaa | 44 | 63 | 1 |
| | exon | | | | | | |
| | junction | | | | | | |
| 208863 | Intron | 4 | 548196 | ttagagactgttggtttcca | 39 | 64 | 1 |
| 208864 | Intron: | 4 | 555208 | catctcttaccttgttagaa | 39 | 65 | 1 |
| | exon | | | | | | |
| | junction | | | | | | |
| 208865 | Intron: | 4 | 578208 | aatatcttacctaagaaagt | 36 | 66 | 1 |
| | exon | | | | | | |
| | junction | | | | | | |
| 208866 | Intron: | 4 | 584202 | ttctgcttgtctgcaacaga | 57 | 67 | 1 |
| | exon | | | | | | |
| | junction | | | | | | |
| 208867 | Intron | 4 | 591287 | tacgcttggtactaaacccg | 62 | 68 | 1 |
| 208868 | Intron | 4 | 591681 | tggaacaaaatgcgtagttg | 48 | 69 | 1 |
| 208869 | Intron | 4 | 591699 | catgagtcctgactataatg | 51 | 70 | 1 |
| 208870 | Intron | 4 | 592045 | tcaaaagcatagaagcatcc | 66 | 71 | 1 |
| 208871 | Intron | 4 | 200606 | ggtaatctcggaagctcaag | 44 | 72 | 1 |
| 208876 | Intron | 4 | 489530 | aatagaaaagcatgtgaggc | 55 | 73 | 1 |

[0173] As shown in Table 1, SEQ ID NOs: 13, 14, 15, 16, 18, 19, 20, 23, 29, 30, 31, 32, 33, 35, 36, 39, 40, 41, 42, 43, 44, 45, 46, 47, 48, 49, 50, 52, 53, 54, 55, 61, 63, 67, 68, 69, 70, 71, 72 and 73 demonstrated at least 40% inhibition of human phosphodiesterase 4B expression in this assay and are therefore preferred. More preferred are SEQ ID NOs: 45, 47 and 48. The target regions to which these preferred sequences are complementary are herein referred to as “preferred target segments” and are therefore preferred for targeting by compounds of the present invention. These preferred target segments are shown in Table 2. The sequences represent the reverse complement of the preferred antisense compounds shown in Table 1. “Target site” indicates the first (5′-most) nucleotide number on the particular target nucleic acid to which the oligonucleotide binds. Also shown in Table 2 is the species in which each of the preferred target segments was found.

TABLE 2

Sequence and position of preferred target segments identified
in phosphodiesterase 4B.

TARGET

| | | | |
|---|---|---|---|
| SEQ ID | TARGET | REV COMP | SEQ ID |

| | | | | | | |
|---|---|---|---|---|---|---|
| SITE ID | NO | SITE | SEQUENCE | OF SEQ ID | ACTIVE IN | NO |

| | | | | | | |
|---|---|---|---|---|---|---|
| 126317 | 4 | 554895 | ggaaacttggcaccagccat | 13 | H. sapiens | 74 |
| 126318 | 4 | 596538 | ctcacattagatactaaatg | 14 | H. sapiens | 75 |
| 126319 | 4 | 596646 | gtgggcatgagttgggttat | 15 | H. sapiens | 76 |
| 126320 | 4 | 596749 | actactgactttgaagaggt | 16 | H. sapiens | 77 |
| 126322 | 4 | 554992 | ggagcacgggggcaccttca | 18 | H. sapiens | 78 |
| 126323 | 4 | 555095 | ttgtttgcagaagaatctta | 19 | H. sapiens | 79 |
| 126324 | 4 | 800 | tctgcgagggcagcctgagg | 20 | H. sapiens | 80 |
| 126328 | 4 | 120898 | cctaagaggggatattttcc | 23 | H. sapiens | 81 |
| 126335 | 4 | 480393 | cttgccagcttgcgaagtgt | 29 | H. sapiens | 82 |
| 126337 | 4 | 584271 | tcaacccacaagaagaatct | 30 | H. sapiens | 83 |
| 126338 | 4 | 584276 | gcagctcatgacccagataa | 31 | H. sapiens | 84 |
| 126339 | 4 | 584281 | tcatgacccagataagtgga | 32 | H. sapiens | 85 |
| 126340 | 4 | 584286 | acccagataagtggagtgaa | 33 | H. sapiens | 86 |
| 126344 | 4 | 586050 | taacctacatgatgacttta | 35 | H. sapiens | 87 |
| 126345 | 4 | 586055 | tacatgatgactttagaaga | 36 | H. sapiens | 88 |
| 126348 | 4 | 588298 | tttttgcagctgccatccat | 39 | H. sapiens | 89 |
| 126349 | 4 | 590604 | cgaagaaagttacaagttca | 40 | H. sapiens | 90 |
| 126350 | 4 | 594998 | tagaagataacaggaactgg | 41 | H. sapiens | 91 |
| 126351 | 4 | 595164 | ctatttcagcagcacaaaga | 42 | H. sapiens | 92 |
| 126352 | 4 | 595224 | agagactgacatagacattg | 43 | H. sapiens | 93 |
| 126353 | 4 | 595327 | tatgtggtagggccagccca | 44 | H. sapiens | 94 |
| 126354 | 4 | 595442 | ctcaggaaatcccacggttg | 45 | H. sapiens | 95 |
| 126355 | 4 | 595615 | actgactaataacttcattt | 46 | H. sapiens | 96 |
| 123200 | 4 | 595657 | ttgtctgccaacctgtgtgc | 47 | H. sapiens | 97 |
| 126356 | 4 | 595662 | tgccaacctgtgtgcctttt | 48 | H. sapiens | 98 |
| 126357 | 4 | 595699 | gtctttaaaatgcctgttga | 49 | H. sapiens | 99 |
| 126358 | 4 | 595954 | tttgcctgcctccaacagta | 50 | H. sapiens | 100 |
| 126360 | 4 | 555090 | tgtgtttgtttgcagaagaa | 52 | H. sapiens | 101 |
| 126363 | 4 | 596667 | actggatcctactatcattg | 53 | H. sapiens | 102 |
| 126364 | 4 | 596719 | ctcacagatgattcttctga | 54 | H. sapiens | 103 |
| 126365 | 4 | 597037 | aacactgcattgtttcaggt | 55 | H. sapiens | 104 |
| 126373 | 4 | 472293 | ttagaacctaaattttccaa | 61 | H. sapiens | 105 |
| 126375 | 4 | 480380 | tttcttctaggtccttgcca | 63 | H. sapiens | 106 |
| 126379 | 4 | 584202 | tctgttgcagacaagcagaa | 67 | H. sapiens | 107 |
| 126380 | 4 | 591287 | cgggtttagtaccaagcgta | 68 | H. sapiens | 108 |
| 126381 | 4 | 591681 | caactacgcattttgttcca | 69 | H. sapiens | 109 |
| 126382 | 4 | 591699 | cattatagtcaggactcatg | 70 | H. sapiens | 110 |
| 126383 | 4 | 592045 | ggatgcttctatgcttttga | 71 | H. sapiens | 111 |
| 126384 | 4 | 200606 | cttgagcttccgagattacc | 72 | H. sapiens | 112 |
| 126389 | 4 | 489530 | gcctcacatgcttttctatt | 73 | H. sapiens | 113 |

[0174] As these “preferred target segments” have been found by experimentation to be open to, and accessible for, hybridization with the antisense compounds of the present invention, one of skill in the art will recognize or be able to ascertain, using no more than routine experimentation, further embodiments of the invention that encompass other compounds that specifically hybridize to these preferred target segments and consequently inhibit the expression of phosphodiesterase 4B.

[0175] According to the present invention, antisense compounds include antisense oligomeric compounds, antisense oligonucleotides, ribozymes, external guide sequence (EGS) oligonucleotides, alternate splicers, primers, probes, and other short oligomeric compounds which hybridize to at least a portion of the target nucleic acid.

### Example 16

Western Blot Analysis of Phosphodiesterase 4B Protein Levels

[0176] Western blot analysis (immunoblot analysis) is carried out using standard methods. Cells are harvested 16-20 h after oligonucleotide treatment, washed once with PBS, suspended in Laemmli buffer (100 μl/well), boiled for 5 minutes and loaded on a 16% SDS-PAGE gel. Gels are run for 1.5 hours at 150 V, and transferred to membrane for western blotting. Appropriate primary antibody directed to phosphodiesterase 4B is used, with a radiolabeled or fluorescently labeled secondary antibody directed against the primary antibody species. Bands are visualized using a PHOSPHORIMAGER™ (Molecular Dynamics, Sunnyvale Calif.).

1. A compound 8 to 80 nucleobases in length targeted to a nucleic acid molecule encoding phosphodiesterase 4B, wherein said compound specifically hybridizes with said nucleic acid molecule encoding phosphodiesterase 4B (SEQ ID NO: 4) and inhibits the expression of phosphodiesterase 4B.

2. The compound of claim 1 comprising 12 to 50 nucleobases in length.

3. The compound of claim 2 comprising 15 to 30 nucleobases in length.

4. The compound of claim 1 comprising an oligonucleotide.

5. The compound of claim 4 comprising an antisense oligonucleotide.

6. The compound of claim 4 comprising a DNA oligonucleotide.

7. The compound of claim 4 comprising an RNA oligonucleotide.

8. The compound of claim 4 comprising a chimeric oligonucleotide.

9. The compound of claim 4 wherein at least a portion of said compound hybridizes with RNA to form an oligonucleotide-RNA duplex.

10. The compound of claim 1 having at least 70% complementarity with a nucleic acid molecule encoding phosphodiesterase 4B (SEQ ID NO: 4) said compound specifically hybridizing to and inhibiting the expression of phosphodiesterase 4B.

11. The compound of claim 1 having at least 80% complementarity with a nucleic acid molecule encoding phosphodiesterase 4B (SEQ ID NO: 4) said compound specifically hybridizing to and inhibiting the expression of phosphodiesterase 4B.

12. The compound of claim 1 having at least 90% complementarity with a nucleic acid molecule encoding phosphodiesterase 4B (SEQ ID NO: 4) said compound specifically hybridizing to and inhibiting the expression of phosphodiesterase 4B.

13. The compound of claim 1 having at least 95% complementarity with a nucleic acid molecule encoding phosphodiesterase 4B (SEQ ID NO: 4) said compound specifically hybridizing to and inhibiting the expression of phosphodiesterase 4B.

14. The compound of claim 1 having at least one modified internucleoside linkage, sugar moiety, or nucleobase.

15. The compound of claim 1 having at least one 2′-O-methoxyethyl sugar moiety.

16. The compound of claim 1 having at least one phosphorothioate internucleoside linkage.

17. The compound of claim 1 having at least one 5-methylcytosine.

18. A method of inhibiting the expression of phosphodiesterase 4B in cells or tissues comprising contacting said cells or tissues with the compound of claim 1 so that expression of phosphodiesterase 4B is inhibited.

19. A method of screening for a modulator of phosphodiesterase 4B, the method comprising the steps of:
a. contacting a preferred target segment of a nucleic acid molecule encoding phosphodiesterase 4B with one or more candidate modulators of phosphodiesterase 4B, and
b. identifying one or more modulators of phosphodiesterase 4B expression which modulate the expression of phosphodiesterase 4B.

20. The method of claim 19 wherein the modulator of phosphodiesterase 4B expression comprises an oligonucleotide, an antisense oligonucleotide, a DNA oligonucleotide, an RNA oligonucleotide, an RNA oligonucleotide having at least a portion of said RNA oligonucleotide capable of hybridizing with RNA to form an oligonucleotide-RNA duplex, or a chimeric oligonucleotide.

21. A diagnostic method for identifying a disease state comprising identifying the presence of phosphodiesterase 4B in a sample using at least one of the primers comprising SEQ ID NOs: 5 or 6, or the probe comprising SEQ ID NO: 7.

22. A kit or assay device comprising the compound of claim 1.

23. A method of treating an animal having a disease or condition associated with phosphodiesterase 4B comprising administering to said animal a therapeutically or prophylactically effective amount of the compound of claim 1 so that expression of phosphodiesterase 4B is inhibited.

24. The method of claim 23 wherein the disease or condition is an autoimmune disorder.

The application's sequence listing, which the Patent Office published only in electronic form, follows.

SEQUENCE LISTING (113 sequences)

SEQ ID NO: 1 - DNA, 20 bp, Artificial Sequence
  Antisense Oligonucleotide
tccgtcatcgctcctcaggg

SEQ ID NO: 2 - DNA, 20 bp, Artificial Sequence
  Antisense Oligonucleotide
gtgcgcgcgagcccgaaatc

SEQ ID NO: 3 - DNA, 20 bp, Artificial Sequence
  Antisense Oligonucleotide
atgcattctgcccccaagga

SEQ ID NO: 4 - DNA, 599001 bp, Homo sapiens
  misc_feature 55607-55706, 360227-360326, 363103-363202, 363428, 366093-366192,368528, 447532, 452653-452752, 457192, 457207-457306, 461808-461907,461921, 461928, 461942: n = A, T, C or G
aatgggggctggggggccggcgagtgtggggttcaaaccaggattttcggtctctggctttggataggcacgcagggctgtgcgtaatccttcagctctggtggtaagggagatgcagtgagctcccggctgggagagagggttattttgcaaaactcccctggtaccgtgcccgcggaatattgcaggaggtctgtgaggtaggtgggggaaaaaataacctgggagggcaatcagggagaggccagacgactggggacggcgtgctttgcaccctagaattgacaggtggtggcctcagcagttacaacctactacacagcatctcgtccgtgcgatacggtcacattgttattccccgcacccggctgaggagcgcagcgcggcagaccaagtggcaccggcgagctgtctctcttccggggggcgggggtggacagtagggagagggggtttaaagggccagaggacgagagaagagctgaggggcgcgtcgccagcgcctgtgtctccctggcgcgggttccccaggctagccccatggcccgtccgcgcgcgcgcccccggcccgcgcgccccttcccggggctcctggcctcgcctcagcggctgcaggctcttcgtcgcgggccgggctgcacgcgagcgccctccgggcagactttcgtcccccacccccgggagcgcggaaggctcactcgcagcgcatggtctacccgcgccgggcggagccccggcgtccagagcgctgcggccgcggcggtgcagcagaggcgcctcgggcaggaggagggcggcttctgcgagggcagcctgaggtaagggctgcctaggaggctgcgggtttatttttcctcattctcttacttcatcacacactgaagcctcaatggagagtgtagggtgctgtggggctgatgtggggcaaagagggaatggggccgccgggcctggatggtcgtcttgacggcgtcattgtcgccccttgtaggaaatccgccaaccggcccctagcctttcgccctcatcttctctgcttcggcttccgcccttggacctcttgacaagtcactggggaggagaggatggagagaggctaagggagaatggagagaggcagaaggattcagggcttggaagccctggagtaggtgacggatgggcgcgcggtgcccagtgattgactgcaggcagcgggcgcggaagggaacctgaactacccaagagtttgctgggctgaggctccaggatgctcctgcgtgccctggtggctggggcaccaaggaggggcgcactcaagcctcggcatcaccaaggctctgccaggaacttttgggaagatttgtctggtgtttggtgagggggcttggacctttctagctacaagagtgtgttggggaaggaagaggctctcctcctttctcctgtcactttccttcatgcctactctcttcttccatcttcctgttttgcctccttccttcccgtttttcacaggccaccttccttgtgcggtacttcaaacacaaatcggaacccactatggccaacagctttaaagcgtgtataaggaggagcgcacagaagaatcgctcttaattacagtagttatatatgtgtgtgtgtgtgtctgtgtgtgtcacacacgtgcctgggataatttttagcaagactttgagacggtcacctaaaattacattgtacttacattaggtttacatcataattatatgatgccactgaacagaaatggtaactctatgcattctgcatcttagatctgagatataactgttctttgaatcacatgcatcgtttaatttcaaagatttccagctgctggaaaactcttggctaagttataagaatgaaaggcacattaagcataaaaaaagtaataaatgtccagatactatttttattagtagatcatactccccctccgtttccttttgccaaaagctgttattataccaattatattcataaaaacgaaacaaatttggagatttcagtgtttttacctacaacctgaagtgtaggtaggggtctagaatttatctgtacatgaattcacaagaagatagataaggccaatgatttcactgcaggtaaaggaagttgagcttcttctctctcaggatacctcatttcttggtatcccaagagagaaatccccttaatgtcaataaatatagcattggtctcttcagctcttcaaatcaatacttgtaggacttgactgtaatatgtttgctggctgtttctattctttttcattttctaaacaacaacgtgccaattttgttaatttacaaaaaataagtaagattgttaaatggactggaatttatgagatggcatgatcgatgcattgaggctgtttatctatatatctatcatctttctatttttcttgttacagttgggagctaaacaatgttgcagtgtgtctacttgtatttttatcagctgatttgcttttcagtttctttatggcttgacatattttgcaaaaatgaattgtcttaaatttctctagagagtaacctgttagacatactgtttgctttcaaaataggactgttttttgatttgaggaataagaaatcaatcatacatggttttctgatcttggagtcctttgcctgtctagagacaggtatttaagtatttaacagtaatagttactgtgtatgtacaaataaaggcttgtttgataaagatactggacacagaaataataattccattttggtttacaaatgcaatatttaaaattgtgaagaaataaagagttctaggttactcctaatatcttacttgacttaatttggctaaggagcaagaggtatatgaagaggtcttcagttagaaagatttggtggttagtaatttattatcatgtcatacaatttcacccatttctatttccaaaaaccttcaaacagcatagtttggacaaggtttaggatgttgctgaccacaaaacaaatgagttccttcaggcactggctattgtagccaccatgtggtaatacagtggacactgtgatgtgccaaatcgttcttcaaggagggacttgttgccccagcttctgggagtgtggtcaacagatggccttcaatagtcagactcttcagggattgcctgagctgtagaaagctcccttgtccaaggtcacacccctttccagcgcagctcacatccaatggctgatccatgtgggagtataaaggttgggccattgcagcacaactctggaaaactctgaaggatctttctagctctggagctccctgagggcttgcattgcagctctacttctctctttggtcctttctgtttccttccccatccttcctcaggtgtggataacaaggcggttcccaagaaaatagggctttgaacttcatttcagaattagcttgccagggaaacccacctgtgactatgttcttaccccatacattcattttgccagttttaatccattggtcttttgaaatgtggtgtttcaaccatcaaatatgatatagaagatgcatatgtggaaggaatttatagttgacagtttctttttcttccagcacttgaaaaatgttatgtcacttcatttcaggcctccctggtttcaatgagaaatttgttgttgtttgaattgacgttcccttatacacaatgcgtcatttctctctggagagtttcaagaatattttctatatcttcattttttggaagtttgattatgatgtgttttggcatgaatttcttttggtttgctctgtttgggatttgatgaagtttttaaaatgtaggtttgtctttcaccaagttgggagattcttaggcattatttcttcaaacacaaaagtgtttcagccccactctctttcttatctgcttctgtgactctgatgatatgaaagttggatcttttgttgttgtcctacaagaccccgaggcttggttcatcatttttttttctggtattttctctttgttcaaatagaaaacattcattggtctgttttcaagttcgctgattctgtcctctgtcttctctactacagagcccatctagtattttattttgattactatatttttcaactcaataatttccatttggttctttttgcagcttatgcttatttgctgagacattctattttttcattagtttctagagaatttgtatttgcttgctgaaactttttttttttttttttttttgagacagagtctcactctgtcacccaggctggagtgcagtggcatgatcttggctctctgcaaactctgcctcctgagttcaagcgattctcctgccttagcttcctgagtacctgggactataggtgcgtgccaccatgcccaggtaattttttgtatttttagtggagaagcggtttcaccattttggctaggatggtcccgatctcctgacctcatgatctgcctgcctcagcctcccaaagtgctgggattacaggcttgagccaccgtgtctagcctgaaacatttttttttttttttgagatggagtctcgctctgttgcctaggctggaatgcagtggcactatttccactcactgcaagctccacctcccaggttcacgccattctctggcctcagccttctgagtggctgggattacaggtgcccgccaccacgcctggctaatttttttgtattttttagtagagacggggtttcaccatgttagccaggatggtctcgatcttctgacctcgtgatccacctgcctcggcctcccaaagtgctgggattacaggtgtgagccactgcgcccggccaacatttttagaataaatgctttgtaatctttgtcagataattccaacatctgattcacttaattgttggtgtcacttgattgtcttttctcattcaagttgtggtcatattttggacattttagctattgtgttagaaggctctgggtttctatttaaatcttgtattttaacagataatcactctgtttagggtaacacacagatcctggcctacttttgtgggcagtggtttcaatgacaatttaatttctagaggctttgaggtgctgttagtctgcctggtttgtctggtgcttccggggctcccactgaacgctgctggtgccacctgaaggggaagaagaagcctccccaggccaggccctgttgtgcctctaggttagagaagtgtctctaagtgactttcagccttgcagaaataaggagcattcttagacctggaacttgtggcaggattcctggtgccagtgctctgaggccacctagtattgtcaaatggaccccagttagatgcagacaaggaatgagcctacctagatcatttcctactactaggttaggagtcgggagactctgggcctgggtaatctgctgttgaatagagagttggaagacatccactgctctattgctctactgttcctccagcctagaggtcactaagcagtccatttccctcttgccaccattctcagtcctccttgggatgccccttgcattatttttattttttaattttaaaaatgtttaaaaatttatttatttatttatttattttttgagatggagtttcgctctgtcacccaggctggagtgcagtggtgcatctcggctcactccaacctctgcctctcgggttcaagcaattcttctgcctcagcctcccaagtagctgggattacaggtgtgtaacaccatacctggctaatttttgtattttttttagtagagatggggtttcaccatgttggccaggctagtctttttttttttttttttttttttttttttttgagacggagtctcgctctgtcgcccaggtcggactgcggactgcagtggcgcaatctcggctcactgcaagctccgcttcccgggttcacgccattctcctgcctcagcctcccgagtagctgggactacaggcgcccgccaccgcgcccggctaattttttgtatttttagtagagacggggtttcaccttgttagccaggatggtctcgatctcctgacctcgtgatccacccgcctcggcctcccaaagtgctgggattacaggcgtgagccaccgcgcccggccgtgccaggctagtcttgaactcctgacctcaagtgatccacctgtcttggcttcccaaagtgctgggattacaggcgtaagccactgcacccggctttttaaaaacactctagtttaaatcctcaaccacattatccattactatcattgaaaatactagtttgattgtatttccctgtaatatatatctgttaggtgtggagacatagtttaaaccttagttcaagatagcttatttaaattaagttaattaatattactgtaattacagaattaaatgtcaaatcataccctgtctgtagagtctaagacaaaaatcttggtatgtgacgtttactctatggaacatttttttttcaagttatcttaatgcatttgaaaaatattagtacttcttatttattgccatctttgtgggaaaggctaaaaaatcctttatcctgtggacactttaaccttagagaaagtaaatgacattatttccataagcaacttgctgatattttgaatggattaaggagcagataccaggattctgtctttggctctcctagtatatcacagtgctgactcatagaattatggcattttcagaactgaaagtgatcttagagatcacctatttcaaccttattgttttatattttagaaaactgacatgttaaaaagccataaggaaatctaagttccttcagttcagtgatggcagggcttgtttattctgagttcttagaatttcctaatttgatattttctttaagaaatcagaattgccttcctttgagaaggcttattaaaaatttattttgaggtataatctctcagtaccccttttttaacaagaaaaactacttcaataagttgggaggacatgatttttttaaataaaaataggcttgtttgaaaatctgagggacatatggattaattatccagaaaaatgaacatatagtcaaaaatttgcattcaatattaagtatttatggattcctaggaaagacctccagatactgttttgtgttatactcatgcactaactgtggattgtctttgttggggaaagtgatagggataatgacttattttatagtctgggtcagccttaaaggcctgtggatggtgacagttgtcctgggcatgctacattggtatactgcaggatttgtctccctgcagattctagagtggcagtaggtgagaaggatgtagcaggaccagcaggtgttcaaacagactgactgtgcgaaatacaaacagggaactcagcccacagtgcttgctctctcctcccccataacacacacacatacacttacaacatatattaagattccttagaaagattctccatctgtttctttctgctctcaccttcttactatatggagaaacagtgtccttttgagatcattctttttctgataagattgctttagtggtcatttaaaaccaatttcacctatatcaaatgttaagggctgaaaaaagaaagattaaagcagcatctgctgtatatactggggggatttttctaagggtaaaaacaaaagcacatccatgttttccttatatcatggattaaaaaaaattaaaaccatagaatgataatgactgaattcagagatcaggaggcaaggccagtattgaaattacttttaagcagactgcctatatatacttaaaggaagctcctatatacacttctgtgactagtacaactccctggatgagaaataagactgaattgttttgcagtgtcatgatgtgtaccagagtgaaaaactcaatgcagaaaaatgggaatgttgtacaaaaagatataacagaatgaggcagtttttttctagttaatttccctagaaagcactttgtaggacttctatttgcaaggttacactttagtaactgaataagtgaggactgggaattggaagtcctgagttccagtgctgctatgcaatttattgggtcagtgacatcctgtgtgtaagcctaagggtataaaataaggccagcttatgataatctctaaagttctttccagcattatcatttggtgaaacttcagattagtggatattgttcgacaaaacatttgaaacaatttgtggtaggcccatgcaattaagtattatccataagaaagatctccaggaagttaatatttgaatttgaaagtagtataatatcttgatatggtcagaatttgcaatagtaagagtggtcacggttgggctaagactatccaactatatgggtatagcacatagcacaatttggggaacaaacattttgctgaaatgataatgacaacggtcatgatgcaaatatggatggcactagatttaactggacggaaggtgtggtagatactgcagattggctgaatatcaattcatcccctttctctctcatcttcctctgctatacaagttggaaagcaaaacattcaattttccagcctcccttgaaggtagcaatggcccctatgacaaagattagatgaaagcttctggggagcacttcccttctcgaacaaagcttcttaaaacgaagtctgtttcccctgtctcttaccccttcttactccatagagcatggatgatcctgtgagtggccatcttgcaaggatgaggaataaatccataggcttaggatgatgaagtggcaaaacagatgtagcttggatcctcggtggcattttcaagatgtatcagccctgcactgcctacctccaggcttactattccatgagaaaaatataaaccccttaattgtttcttccactattttgttagattatttgttacttccagcaaaatacttttccaactgaatacatgaagtaatttttaagacctcacattttacatttttgaaggataaaattagtgtctacagatctatgtaattactgaccttggatatgaaacttagggtactttgtaccaatactttcattttgaagaagtttgggtgtgaaaattttggataatttgtataattttcatcttatttttcattgcatgaagaatagcatgagacttcaagagtctctgttttgcattgcttagagaatagttcaaattttattcaatgggtaaaatttatattaagaaaactctttctgtgagtcatacctcctacttagccataatcttcggtaagatagggatacagctgaagaataccaatgagtcttgaaaataattgttttccccatttggattataggcaaaatgtatagcaaagtgggtttccctctttactatttaatgtgagtttgtttccaccaaatttcttctgacttcacactgtcacaaactgagaaatactttaaaaggaggagtgtaaaggtgaaagaaggttggaatttgcagtacatggatataaaagatggaaaataattttgtgcatatgacaaggaatctacagactctccatttggatttgtctgacttagtgcagggaattaatttttgctttaagccgtgtgataagagaaaaagaaggattcaattgggatatgttgataatattatagcagttaagattgcattcatttgggagtaaccaataatttgacatacaatgctacaaccagcaagaagtttattttttttatacaacataaagtgtcagcaggaagatagttcttaataaccgaggaaactatgaaggaattgggctccttcctgcttttgactccactgtaattagtgtctcctggttgaaagtgtcaccagttttctcctggtgaaaagacagttaataaagcttccaggcatgacatctgtaccacaggcaggtagaggtggccaggcacaaggcacacagcagctgagtccgtcctttttaataaggaaaatattagcttcctgggaagttgcatctggtagacttctaatatcttatgcaccagaactatgtcaatggccatacctaagtacaaggaattatgagaaatagtttgtttgtgttttaattgttgtctggaaaaattggtacctcccccaaaatgtcaggattctgttatataatgaaaaaagggaaaatagatatggggtaggaaaccactattgtcattgcatatgaaaatattttacagcttttaaaatatttgcggtgttgtctcataaatttgtaatctggagatttcttaagatatgatagtttaaaatggttataaatttttatttgcctcattatctaatttttttaatcagttgtcattgtgtcaagagagctgactgatatatgaaactgagtgatagtattgctattaagggaattataagcaaaaaagtcacaatttccttctacattaatgatgacatatataagtgtgaaattctgagaaatcagatagtgacactattgtgtactattatgtattatttatttataaaatgtatttgtgtactatttatttataaaatgttatgcttttttgttttccctaaatttttaatgacatatattaatattatccaagagcaaatatattttttaaaagaataaaataaacttggcttaatctcagcatttctactttgctatactcattcaagatattgacaaaaatatccttcataattgaaggtttattctccaattgatgtaggcactctacttagaagctgtttatccacatcaaggctaatggatttctttttctagttagttttttcacattaaaatagggagaggcaactgttctcaccacacatcaaaaggatgttataaagacaaatgaaataatggatgtgaagtgcattattcgctctaaaaggtgttatataaattctataaatagtattattaatgtgtaaagaagatgatgggtgatcatttccaaaagtgagtatcataaccaggaattttgagtgtggtcttcaatacaagtttttcaaagagaacaataaaaacaacatattcttaagttcttgcattgaaatatcactggtaaacctcactgtgaggggaagagaatgtacagaaagggcttcaaagccaggcaatttcttgaataatgcaacatagtaatagattttgcccagatataaaaagtcctttgggtctcttaaatggtttgtgagatgggaaaactcggattaaaatgtacgattccagtgctggaaatagaatcttaaatctagaatggaacttccaatgccatatcttggaaacaatgaggttctgctttactaaaaaaatcttcaataaaggcttttgtaatactgtcagtaaaggtttttgtcagccctttggacgccagcttttatttcttgaaaagtaaattttaaataggaagttgttccttatttctaaccatggcaaatgtcatgctttctatgtgctggtcactagggaaaatgaattgtatgatatgctgataatgcttgactttgagccagggagcaaggcttgtgtcttagttttgtcactaacttaattgtgtaactgggaaaattattcaattgtttcatgtaaagaaacagtctttaaactacatcattttcctctttaggctttttaggcatgcttaggggacttgtctaatggagatcgtaggggaaagtcacacctctgtgggaaaaatactgggtctctttcatgtcaaatttatggtgatgagtgtttacatgaaattgtcatgtgaaaagtgatctggaaataagtacaaggaaggaagctttgcttttctctgtgctttatgctcttgcttgatttgttgaagatcaatgctaatgtgtggggttccaagtggtgtatgctaaagagacagtagctaagaaggaacaaaggtggttagttaaggagagcacgtcatactttgtaaatcagattgtcaacattattttatctctttttgctttaccccaagtcattagaaagtcttgtttaattgtcttggctgtcttatgaaaattaagagggaggttaaattcaggcaagtgttttggacaggaagtagttccccttggcctaaagcactgtggtagtagcagtagcagcaataattagagagtagggaattcttaagagaagataggggagaaatgaagaggggaataggggaattgtggctgccaaacaccactagaggtccagctgtcattttccaaatggataattttcttccactgtgcatgacagaaatatatttcttggtcatgtaatgatactgagctattccaggtgggctgggaggaggaagtgggagctctctgacctgctgtttcaggtgagtcatgtcgtggctgctctgcttcttgtagtcacccagggaccttagagtagaggtgcttatttttaaaaattccttaattaatagactttattattaattttaattgatacacaatatgttaacatatttaaggggcacatctttttttttgggggggtgggtggggggtgggaggactgaatctcactctgtcttccaggctggggtgcagtggtacgatctcggctcactgcaacctctgcctccagggttcaagtgattctccagcctcagcctcccgagtagctgggattacaggcgtgcaccaccaagcctggataagttttatatttttagtagaaatggggttttgccatgttggccaggctggtctcgaactcctgaactcaggtgatctacccaccttggcctcccaaagtgctgggattacaggcgtgagccactgctcctggccaggggcatgtctcttttcagtacatggatttcaaagatgtcatgaccaactccattctgacagagcatggtggagaaagagtgggtgaatattatggtgtcctggaagaggcacacatcctttatatttatattattgtttagaactcagtcttatggccaaacctaattgaaagagagactgggatattttatctaagctgtgtgtctaaagaaaagaaagcagatatttttgtggatagctaatagtatctgcagtacaatcattgtgcagcttttttttttaaacctctttcctacagcagattccttgtttcctgatttttatatcttcctgtttcttggtttaatcttttgtattgataggtggagcatatcttccaatatcttcctaaggaagagtatttaaaggtagaacttttgaaatgttttacatctggaaatgtttttcttctattttacaccttgtggatgtagaattctaggaagccattttactcagaattttgaaggcatatttccatgtctgttggctgtcattttagccattaagaagtttgatgctattttgaatcttgatcctttaaatgtgaagtctttttctcatttgaagctttttaacatcatctcattctccttgaaaattttgaaatttcaagattatgtacctgggtgcaggtcatttctaattttggtgggggagctcagtgggtcttttctttctggatactgtactcttctttagttctggaagtttttcttctattatcaattttattaattctgaagtcaattttcccccattatttaacatctcagatcaacatgcacctttaatcgatggtgtcttataaaagccagatgtcaatcatgagttggttgtgtaaaaaacattctattgacaccttctgacatgactttgaaacaagtgctaacattagcactatattagtgctaaattatttcatttggttttcttggttctgttttctagaatttctattacttcttagtgatacataaaataatgcttgtttttgattgtaaggtacacaattattttatgtatgactaagaaaaaatactagcaatgaaactgtaaacagtgttttctaatcacttacacaattaattttatttttattgaaagaacatgcttacacttaaatataaaatatatgatatatttctcccatgaatgcataacaaaagaacacatactaaaatagcttagatgagttattctaaaaactgattcactttcagagttttaaattcacatttgaatccgtctcttcagaatcctgagtcactaatatctgtgtttatccatgcagttccactttatgtaccatcagtagagctggtcctgaaaagatgcttagcaattatgttgatcgagcttgccttgtgattcctgctttggggatgttgttaaacatgcttgattccccactgatcctatctcttcattacaggtatatgatttctagatgttaaaggatgctccattattgtttcttagatttccttgtgaccaaactctcattactgctatctctctgacggcagttgtaaaatactgtcaattgtagggcatatcctgatttcagggctgtaattggaaaatatacatggtatttagatgctgagccatcaggattaatcctctaaaaatttcttatcttttaaaaacaaattttctttcacatattacatattgttctgtgtatagttactcttctactgtgtaccttaattgcaaggtaaagagaaacttgaattttcttaaagtgaaacagaaatggcaagaatccctggggtccttttacctctaacagcagcacatctgctagaaaactcacctgacctgggagatgatcaaatcataaagagaaccacatttgtgattcaggcacccctttgcaggtacctcagagaatcatgtctagaagcagtgggaaacatttctccagctgtccctctgcatagattcacagattcacaattatattatacacatcgttctataactgcatgtattcactcaaaattgagtaaaaaaatcgatttctcgcatcattatgaagggctgtattgtattctattgaataagtgtactatgctttattgaatccattctctaatgatgaatattcaaatcactttcattttaattattggaatttaccaatgctttaataagtatcccagtataaatgtttggaattgctgagttaagggctatacacaatttaaaggctttttgacataaacttttcttccagaaagtgtataccaatgtatggtttcaccaactgtcgattgtagtgctagtttcctcctatccctctaatcccatttcctcatatccctctaattctcgattttgtcaagtcattggtcaatgtgaggagagaaaaacggtctcttggctattttcaattggttttctttaattactcatgagcctaacgaacttttcaatgtgatgtggtgtcctctgagagagaaagcagctgcccaagtagggttggagtgggcagggcagctggagtggccccttggttggtgtcagtagaaggtatctgtcaggaaaggagtagttactgctttggagacctggaaggtttggagaactctgtgatttaagccctttagccttcatggagatcctttttgttaccttcccaaagtagctggatgcctttcaggttccacagttattgttactttgaccatagtgtctgcgtgaatacagagcatcgacctctagactgtataatcctcatctagtcccagagacaggatggcctaggggcaataagtaggtgaagtgtaagtagggctttgagtcagtgaggattaaagggagtgttgggtccatcaagtaggtagacaaacacttttttttttttttttttttgaagcagactcttgatctgatgcccaggctggagtgaagtagtacaattctagctcactataaccttcaactcctgggctcaagtgaccctcctgcctcaacctcccaagtagctagcactacaggcatgcaccaccacacctggctaatttaaagaaattgtagagacagggtcttgctacgttgcccaggctggtcttgaacttctggtctcaagcaattctcctgcctcagcttcccaaagtgctgagattacaggcatgagccattatcctcagctggaagagcataaatgtttgaaggcagacagtataaggcatagtgagggaatagtaagtctagacaattttccacataggtgaggaatgggaggacgtgtttgaaaggtgggctgagatcacactgtgaactttgagcatatgaaagtgagttttaggagggggatctttatcttaatggcagtgggggccctctgaaatttttggaattctgatgtggtgggacctgacaagtgtcatgtagtaggaaatttaatagcattggaaagcattggaaatgaatgtgggtagtacaaaaggtttctatgtgtatcctgtacttggtaaagggtagaaccttttcagttatggctgatttgtgtttagagggacatataatcagttgaatgcttctagtacatgattgttgttattttctatttctcagaaaaagacaacttaagagtagctcattttttggacacacagatcaggcttttacaatatgtttaggttttaacagaataacagaaagtggaattgttttttgaacatgttatgtggtgtgtgggtagatatttagtctttagaaatgcaaaatgggctgggcgtggtagctcatgcctgtaatcccagcactttgggatgctgaggcgggtggatcacttgaggtcaggagttcgaaaccagcctggtcaacatgatgaaaccccgtctctactaaaaatacaaaaattagctgggcatggtggcacgggcctgtaatcccagctacttgggaggcttaagcaggagaattgtttgaacctgggaggcagaggttgcagtgaactgagattgcaccactgcaatctagcctgggtgacagagtgagactccatctcacaaaaaaaaaaaaaaaaaaaaaaaaaaaaaattgcaaaacgaattcagaagatgcatcaaaaacaacctatagaattgccatgagatcgtcagctttgccaaatgacagcaaacatataatttcaaatggaaaatacactcattaagccatttagactagtgaagttatatgtgttatattttatattccatttgtatatggactcatttttcatattgaaatattagcataaatgaggagatctaaacactgccttcatttgattgggaaattatcttaagtacatgatataggatatttaaagaggctttagcattcatagcttggaattggatagtttatggttattttcttatttttgttgaaatttaaactgcactttctgaaatagcatttattatactttcagatatcatctgtcttgactaggaagtcagtcactgaatgagtaattttgtttctggtattactgcctgacaaactgattttcagagatggtcataaaagcagcattaatgatcatttttagagatagaatgacaaatatcttgataaatcatgccttgtgcttaacttatttatgaatagtttctgctgtggatctttttggtgctcttaaaatgcagttaaatttgtagttcaagaattgaatttttattcttccagtaattgcagccaagggctgcactctctttcagcctagataagccacagtgacattcctaggccaaaagaaggatgcttgttgaaagctggtgggcagtgaaaaggacaggcagtgtatagcttccctttcaaatgcagaaacagggcttctccaaggtggagtgttgataaattatgggatattccaaaagtccttagtccacactttctgctctagcaaaggtaatttttgctatttattttgacctaagtacctttataaagattttgttttttcctctggaggaaggtaactaatatttattgagcactcaccatgtgccaagcatcttaggaaatgctttaaatgcagtctcatttaattcctactattaccttgtgatgaaagcattattatactaattttgaggatgaaaacattaagcctcagccaagtaatttgcttaagtttatatagcgagggctgacttgttttttttctttcaccaacccaaagtctatactttttctagtgcctgcttaagactcagtatgttaaaactttaaaaatatttattgagagtttcagtatgttccaggtatataacttagatatatttattttcattttaaagatgaagaaatggagaggttcagattaatacttttttcagcattacacagagccaggattcaaacttaggtctatctgactccaaagcctatgctcttacctaccacattgacttgtaagactttttcttaaagggttatattttaaaattattattaatatttacaattattttctatttaattcttttcttaagtacataaatgccataagtgctacccccttttcatgcaaatatagtgagttaatgtggaggatctactactaaatgcctttaggattctgctaaacgcttcgaatacgttagggtttctcaaccccagtgcaattgatactttgggccagatgattccctgtttgggagacagcctgtctcgtgcattgcagggtgtttaacagcatccctggcctctaccaactagatgcaaacaacactctcttttccccctacccagttgtgacaaccaaaaatgcttcagacattatcaaatatcttttgtcagagaggaaatcacctgaagttgaaaactaatggtctacattatctcatcttatccttagaacaccccatgaggctcatatcattatgatctcagctttacacaataagaataacttgctcagggtcatatgctgagaaatagtatcttcagggctcaaattgaaggcttacctatgactttggactaatttttgttgtatttcatggactacgtcttgtcttcaaacttaacttgagcatcctcaaggcttggctatgtcagattctcctttttcttttgccccaagggcacctagaaaagtacttaatacccagctgtgctttgacagatgttcattaagcaaatgacccattttatgtgggtcatatttaaataagcatattttaaataaaatagagctgagtgcagtaattaagaatcagacacatcacaggtttacatctcattcctgccatttattagttataggatcatggaaaaatttttgacctatttgatttcctcatttgtttgtgactaataatccctcctgtggataatgtgaggagtgagttaacatataaagtcatctagcatagtacaagacacaaggttacaaagttaagtacatgatagctactagtaatacaaataatattaatattaatgatagtaaggtggcttggattttctctttatattatgacataatttacatatacttttatttcaataaatttagaaaaaaatttcttgtctgcctaagacaacttgaaagctgctgtttcattaacgttaaataaaaattacatgaaatataaaatatacagaaggtaaatgaggaaattagggggaaaaagtaaagccaaacaaacaaaccaaaaaaaaccccaggaccattaaaagacaaaattaacatattgtagtactgaggtttcagtgaggaattaagcttagttcctttcatttcactaaagaagttttaacccttgtggtggctcaagggctagggcttcttttggctttgagagcagatgaattgactcatccctgacctcagccctcagccttctgctgatttggcatctctagcttccttccccgaggtctgaccttttgcctcatttcctctgactcaattttgggttctgttcttggctttcagtttctgctctgagagttccttttctaaatttctgggtcctcttgtaggttagttactcacttgtttcagtttctctgctggtctccttcttagggtatggccctccatgctctgccacacctgggttgcatcagctgctcaaaggcagcatttctcacctgctgctgctctccctgatccagggccaacttggacaaatcccttccaaatgtaattggccataatcatgtaggttttaactataggttggtggcattaaatttccaagacagtaaaatgtcagggtggaaattcattgtttttagatactggagggactttctgtgttttaaatgcctctcaattatttttttcatccattggcacactttggaatgttaatatttgtagtaaatactgaactacatagataatgctgtttgtggttctaggaattacatgcctatcctagggactgaggggacgactgtctcagcctcctatatgatattatgtatagaaatgcactggttgagaagctctattctaaagtctccatgaaaacacaaatagatagcactgggcaggggttgggagagagtataacaccttaaacaattattctctagcttctttatttctatttgcctgtcaactgctttctaagggtcctagacagccctggaaaagttgccccaggaatacaaaaccttaagaatgaagataaggacactaaagtttctgtaggggctggagagggaatacctaaatctattctaagacatgttgggagatactaaaactggaacgagattgggaacaggcagagagttaggaggctaccgagggagttcaggaatgaggtattgagggtttggtttattagctgctcacctgtagaggagtgagtcacttatttaaattcatacagaaaatatgtaagcatatatggtgggttggttgttaatactttgtcaaatgcatgccacttaactaatcgtgggaggtcactataattaccatttagatgtgagaggtatacggagggagaaagaagtcaacagtaatatgcaagttactattttaattaattgggggaattgaattgccattcactaaagaaagactaagaaaaagatacagttttgctgggggaaatggcatgttgagttttgaacgtgcaagtttgagatatttttgccatataaaataatacctatctgaaaagtatttggaaggtggtctggaactctcaggaaaaagccagatcagagtaaacagattttagaagtgaacaatatagagatctatacattttcattgtgggccctggaaatcatattcaaaatagtatgaaaaatgtgtgccagtgtagtttttctgaggagggggtcctctatagtttcaaagaatcactgctacagatagatgagataggtaaattaagaccttaatggcaaatgggtagaaattatgatttttaaagtaaaagaggaaaatgaatcaaggataacttcagggtatttttttctttggcagcagtgcaagagtaggagaagaaattggtttgtgaagctatggggttagaaatactgaatttgaattagaatgtagctttgaaaaataatgtgtccaataggcagtaggcactgcggcaaaaaaaaaaaaaaaaaaaacaacagttgagagatctggaatatagatttgtttgtcttcagtgttatgctgataatagaagccctgagtgtatgtgagctttaagccaattattagactaaaaagagaacagtgaagaagtccaagttttgagctttgggtattacccagagtcgagagccaggtgaacagaagggctggggcactctgggcacttgacagaaaattcagtcgtgaattgactacagcacattgcttgccaaagccttgcccgaggcagctgctggttgatggaaacagctcagggtgtgtgtcagcactcttcctctagctggctggactggtagtcttcaaatccttttgctccctcatccttataacaatatttaagtcacatcatcttattatatgtacatatgtttagatgctgtagagaatatgtgaaaacagaaatttatgaagatgaaatacattgataaaagatgaatgtaatatatatattcttataaccaatggattattttgtgcaccttctgtaatgcttttttttaaaagaaactttattgagatactgcttaagtacaataagttaaactcatttaaaaggctacaatttagtgactattgacaaatgtgttcaattatgaaaacaccacaatcaagatatttccattactctcgaaagtttcctggtgcctccttgctgtccattcctctctctaacccatcctttggcaaacactgatctgctttctttcactgtgaattagttttagttgttataattttatataaatagaatcatatagtatctgcttttttttgtttctgtcactcaaaggatgctttttttcttattgctgtatgggatatagcaaaatgtctttatacatttacctgttgattgtcatttaggttgttcccaggtgtaaactattacaaaaataccagctacaaatttttttttgtataagtttttgcatggatatatgtttttatttgtcttgagtaaatacctagttatggaaaagcttgatttttctaggtaattagaaagtgcttggctatgcaaaaattattgcatttcccagcaaaagtgtgttcattaattcttcattcaacacacattttatttatttatttatttatttatttatttatttatttatttattattattatactttaagttttacggtacacgtgcacaatgtgcaggttagttacatatgtatacatgtgccatgctggtgcgctgcacccactaactcgtcatctagcattaggtaatctcccagtgccatccctcccccctcccccccaccctcaacacacatttttaagcaagcataacttgtgctttaagagccaacataaatattacatctctgcttttgaagaaatttaatttaagatatataaatttggaagccatatagatgattaagttggtgtttcaagtcacgagacaacacaattatttatcaaatggtagttcagtttgggaatagaaattgagtactgttggctctgtaagtgagaaaaaatacaaccaaaattaaaaattaaactgagaataaatgcaacatggtatcctggattggatgctggaatggtaaaaggaccttagtggaaaaatggctgaagtgtgtatggaaactctgtactatctttacaacttttctgtaaatttaaaatgatttgaaaataaaaaagtttatttttaaaaaaaggttcattgagaaaccaattgtaaaattaggagtttctgttcaataaaatttgtcctgaagctaaaaaaatttaaactgaactaaacatttgatcatatatgacaaagatacattcttattaaataaaatgcacttatcagtcaataataacaatcctactctcttcaaagaatattggacaaagtatataaaagcaatcagtaaaaggattcatacatattgctatataaggaaggaaccatattcacctgcctcaagtttttacataaaaggacttcagctacagtaccttgttccgtttcctcatttctgactccatcctaagctaactgatcttaataattggtgagaaaaaaataacaactgcttggctcggctctttctcaattttctcttttcctatagatgcacctcagctgcttgtgtttcagttttagaagaatcttggaaggtccaagtgttatcaaaagtcaagtattcttttctgatcagcctaaacattaagaaagctattttttaaaatcagtgtgattcctgtttctgtttttagtgattattaatgcagtgtgtgtgtgtgtgtgtgtgtgtgtgtgtgtgtgtatgagagagagagagatagagagatttggttttggggtggggtggtgagtacaattaattatctcaacccttgacagctaataaacgcttgaagatatattaattctccatagtaaccaaataagtgcaacttaaagcaaggttgctgctaccgaattgataattcataaaaggtttcagaaggaaaaatagccagttttgaagaatttttagtgaaaggacctttaaactgtgagtagaaatataaattggtacaattttccccaaaggcaaattggcaatttgtatcaataaccataaaatggttcatactcaattttgattttatgataaaatctatggaagcaatcacagatttcatcacaaagatttataaacaaggatgttagtcaagcactatttataatggacaaagaaagcaaaacagccttattatctaatatggggatattatgctacttactattaaagccatgaaaatcattttttgaagagtatttgttgatttgggaaaattaatatgatacagtataaattagataaaaacaagatacaatactatatgtgtgttttaattcgaattttgtaagcagcttctatgtaataagttttgtaaaaagcatttttataaaattataattttgaaaaataattttgtaacaaagccaacacaaatacattcataaacatatttgtaaaaaagtattattaagtgagatgattcttgtgctccagacttgtagctgaggttcaaaactgtgaacaaagtttactatgtactgcacagaaatggtaatttttgggggtgcacaatgtttgtgaggagtgggcccaattaaaagggtgtcctcatgatgcctgcctgccacacaggaggcatctaaagccagtgtgaaattgttaagcagagaaccaagagccaggaaaataatcataagagggtgacaatctctcccagttaagttaggagagatttattcgttttctcttccctgtctttggtggagttagcctttaagagaaaagaggcagtatgtaagggtgctgcttcttgcattcagaaccttgttgacagggaacccaagtgtagctttcattggtggcagggtaatggaagagctttaaatttaaggttgaagattgaaatttgaaaatgaaaggactgagccttaagtatcaaagcaagactcttctgtaactctaaatttacatgtacatgtcagtacatacatggcttgctgatggggtcccaactcactgctgtgtacacatgaagtggtttttatttatttatttttactgtcgcaggtcaaactctagtccctccctttattattgcaactcttattgatgtgttgaccagactctatatctaaattcgttgtttggtttttataggattgtgtatgtattttgtacatcatgaatgaatgaaaagagctagaagcatacgccctaaaaattgaagattaattaatgatcttttagtcatagatttatccattttgtttgcatctttagacttccttgtattttcaaaaacaattatgtataataatttataatctcacaaaaatatatatttcaaaaatgtcttctgtaaaattataattgaagatgatattcattgtgttacttgatttacatattttacaaggacacacacattatttttattcttaaaaaattaacacctcaggaaaatgtttcttcagataaacttgtaaaatttcttttatcagatacaaatatagggcctcttctgctctagttgtcaaaaaaaaagctaaattcattgctcagctgtcactgttattgattttgccctcatcatgtctaatttagaatccttcagcagccttctaattattccctgctctaacctcttccaccctcaacaatgccttccaagggatatttctagcctgcaaatctagctatagttatttccacacttaaaattcttcagccactttctatgtcacaaaaccaaactatgggcctggcactctaagcttttcctgctcaggactctgcctaaatgtcttttcttgtgtattgttcttttcctgtttgcattctattcttcaaccttattaaattacttgtaattttcctagagagctgtgatcttttcatgcttttgctctatttcttgtgttcttttctcttccatcctccttcttcctattgtccctgtctctggagaaaattttttcttttcctttaatgggctcccttttacctggcagagtaatctattcctttcttgtgttcccagcgtcacatgtacagaactgtaattcttcattttcttgtgtgtgtcttctgtataaatattaggagattctcaaaggccagaaccacgcctttctcaattagctaagggcttattatacaatgaatgtttaatacatacatatatatatatgcatacatatatattcacacacacacacatatatatatatatatataaaataacaaaaatcttcaaatacattgccttttaaaatccatgcaacaaactcaggaggcagatgttattatacaggtaaagaaatggaagcttagagatattatatttattgcgttgttatttgcttaatacctgtctcttccactggaccataagctcaacaaagtcagggatagtattagtcaaggataagctagcataggttgcaataataaaacacccccaaatttcagtggcttcttaaaaaccccaacatagtttgtttctcactcatactgcatgcccattgtgagtgtggtgctcttctgccacacttagattttactctgggatcagtctaacaaaacagctgctaccttgaacattgccaattgccatagcagaaggagaagggatgtggaaccacacaagggcttttgaacttctgcccatgtttcattggccaaagcaagccacatgacctgtcctaaatacaacaggatgggtatatataatccacctagagggatggcaccacagagaaaaatgaaatatatggcagacaaaataatctatcatagataacccaactgttttgtccacgattacatatccaataccctatgcctgattcattgtaggtctcagtatatggtgattgcatgattgaatgtcagaaggcttgtaggagtgccggaactgttatttgattagtctaactccagagaccagtctgaatgactttgctatttatataacttggtctcagatatttacgaatatccattctctgcttattctcttgtttgtttttgttttgtttttttttttttttgagacagagtctcgctctgtcgcccaggctggagtacagtggcgcgatctcggctcactgcaagctccgcctcccgggttcacgctattctcctgccttagccttgagtagctgggactataggcgcccgccaccgcggcgggctatttttttgtatttttagcagagacggggtttcaccgtgttagccaggatggtctcgatctcctgacctcatgatccgcctgcctcggcctcccaaagtgctgagtcaccgcgcctggcatattctcttgtttttgctttgtttataattgttctgtaaagggcatgaaattagttgctgtgactgtaaaagaattacagaaggaatgaccgcagaggtagaaggattccaccaatgtatagctccagagaaatcatgttacgaattcacaaggaaaagaataagagacagtatcaacagagcaagagattgattagacaaaaagactacgatttggttggaaaaggtctttgctgtcagatatttcaggggagttatgggggcaactaagtgaaggttttcagatttaatcaaactaaaagatagaagtaatagcaacagtatatatctttcagagcattctgagactgaaattgggaatggaggtgtggttgagatcccatattgaaggaatacagagattttctctttgcaattgaaatattcaagtgggctcattctccattttcttagaaatagagaaggaaagaactttaaaaattgaagaatggattttatctctgaataaccacattaatctcattgaatgacaaatcaatctgaacaattcactatggaaaaaagaacttcaaatattgtaggttagataggcactttttgcaattctaataatcttgttttatggttaaaataaaatatgaaattataaagattaattgaagtattgctttctcactaatgagattagattgtctgtggtcagaaatgtgtgttagtacaagagatttagtaggggtgagatgaatttcctgaagaggaattctagaggcagagtaagagcatatgttttaagtaagatgtatcttagccctttaaaaaattactttaccaccttaaatttaggttttaattcagtctgtagtccttaatagcagtgagtcaatgggaaaattaatcccttgggttcttcctttcttcatctacaaagtagagatatggtatttacattgacattttatttaataaataataatgcatggaagtattgacaatcaatggtagctccaaagatagacaattagaaataattacagaaataattactcagccatccactttcactcctaggaaagagcaggaaaagtgagattagatggacagaatttgatcaactctggtttactttttgacacattgaaatctctgtaaggtaagtcaggcttaacagtgctgcatggtgggccccagcccaggaaattatttttccttagagcctcagaattcatttagctacttggaattttaataaagaattttaccaaccctggccataatttacaaactctgtggcttgcctgaatccactgaggagagatgagtacattgcatgagacagggcactctgtctctaatgatgactccagctgaccacagcttggtcaggcacagtggaatgcagcttattctgcccctagaaaggttaaagtggttgcgtcatttataaactgtcagtcttttttattcttgcttaaggttgcaggagagtaattgccatagcaacagttatcccttccaatgctgttaagtacaagggtgccccttggtagaatgattggagattcaggaagttctaatcctgttatgatttattcaatatttctttgattttgaaactatttaacaagttctttgcacattttcctggaaagtagcatagattctgtataatagctcttagggctagaagctgtctcctaaagaagtctactttctccagtcctggtcttcctacatatagaagttctctatttcatgaaaactaaaaaaaacctgctttatccagttacttgtgtcttaaatctattttgtctatacttctccctaatctacttctctttctgacttctcattttagataatggtactaacttctctttctacaaacagaaactcagaattgagtgtcattttatactcattctgcaatctaaaattgatctgccaattttgcctatttagtgcagttgttctcattcctggcatgcataagaatcaactgtagagtctttaaaaaatgtcacccttaaaacttatccctggatatgctgggatatgaatgtccatcttttgtattgtgaaaatttcagagatattgaaaagtacaatataaaatagaaaaataaggtataaatatagcaaaacaactgtttagctccaacttagctcagaaaaacagaacgttaccaacatagctgatgcatcctatgtattgctggtctagcatttccttcttcctcccttcaagggtaatttctactctcaatattgtatttatttttcccttagatttccttataggtatgtgtcttcctgagcagtagctggttaaattttgtttgatttttatgtaaatgccatactgtgtgtaatctatgacctgccttttttattctctattatagttttaatatttattcatgctgatgcctgcacctgtggcccacttatttagtgtagtactccactaatgactatagctcaattaattaatcttctctcccgtgaatggatattaagattgttttcggtgattttttttggccaggtgcacatctttagtgcatatatctaggagtgaaattgctgtcttaaactttacatttacattttcaactttgcaaaatgatgcctttttttccccaaagtggttgtatcaatttactccaacagtcatgtatgagaatttgtggtgcttcatatctctgtctttacttgttactgcctgctatggtttgaatgtatgtgtccctccaaaatttgcatgttagaacttaaaccccaaacgtggcagtactaagaggtgagactttctggaggtaatttggtcatgagggctctgccgtcatgaatgagattaatgccttataaaagggctggagggacctagctaggtcctttttcccttccgctgcttctaccacatgaggacacagcatttgacccttctggaggacatggcaagcaacaggtactatcttggaaacagagagatccaaccctcaccagacactgaacctgccagtgtcttgatcttggacttcccaatctccaaaactgtgagaaattaatttctattattgataatttgctcagtctgtgatattttgttatagcagcagaaacatactaagacactgctcaagattttttttccaattttatactagacgttgtaaagtggtatcgcatactgattttaatttccattttcctgataattaatgaggctgagcttcttttcttatttatatctgccattcttgcttcctcttctgaaaaattcttattcttctctcctgttgttcatctgcattttaaaaaattctggacaggctgggcacagtggctcgtgcctatagtcccagcactttgggaggccgaggcggatggatcgcaaggtcaggagttcgagaccagcctggccaacatggtgaaaccccgtctctactaaaaatacaaaaatttgctgggtgtggtggtgtgtgtctgtaatcccagctactcaggaggctgaggcatgagaattgcttgaacccaggaggcagaagttgcagtgagccaagatcgcaccattgtactacagcctggccgacagagtgagactccatctctaaaaaaaaaaaaaaaaaaaaaaaaaaattctggagaggtaattctgaagagcagccaaggttgagagtgactgtctttatgtcttacttctgtcccttccttattgtttccactgcgcctgcactggttcaggcccttgccatgttataacgtctcatctgtttgcagtactctttttactggtctctgagcatccagtctccccactatcaattcatctgaccattttcttctccctggaccctagttctgactgatcatctaactcccttgttcagaatattggtgacttccacttgcctgcaagtaacatctgaacgtcttatatgcctctttgatgaatacctacctacatctctaatgttgcttccctctagtttcatcatctacactttctttctgcagattctaatatcttgttatgtcaatatgaacactatagtttcttccttccatgcctggccacccatgagctccactgcttatctgctatgtaccccttaaaaatgaaagcaatcatccattctctgtcttctaaactattgcaacatgtaattgtttatatttcccttgttctcttgaccactttctacctggtgttatagttgtctttgccaggtagcaaatccaggaagttataatccttcattctcaccccccatctcagtgcattttatatactaggggatagcaattgttttgtgaatgaataaaatcatgcaatggaaatagaacccaagtctcaggattgtctttttttatttttattttttgtaaaatcaatcaattcctcaaggtcaataactgagtcttctcaggctggtgtgttctttttcctagggtatctttcacatacttagtgtgaagataaaaggagaccattggcttcattgtttaagcaaacatatttaatattgcacaatcaactaactgtacccttaagaccatagatacattaaaaaaattcttagtgatgaaaaacagtaatattttagtgtgagtatgcttaaagaaaatagtttaaatattttaggaattaaatctggtgaataaaatgaactaggcaatactacttttcataaaaaatattgacagtgctctgtatgcaaaaatattagaggattgattatgtggaaatataaaggaataagactgaatttcttatgtgacttataaattacccctaaagtaatttatatatgaatacttcacctacatatatatatacacatatatatttatatatatacaaatatatacatacatatatatatatacacacaattcataaaccaataaattctctgatgtgcatatttgacaaccattgctggcattttacaatttcatttacagcaagcccttcttggtagtttctttgtgtgattgatgctgaatacagctttgttgctgcctcctcaggtctgagttggtgtgcaggcaataaggaggtccagctttctgaagcccagttgaatcaggctctctagtgatgctacagatcatcagaatggttcatttgggtgataacaaagttacattaaacacaatctatctctcataatgatggcagaagaatgtgggtgttttctttcatgaaatcccccagtaccatttggatcagtagcagacatgattaactggtgaccccaaagcatttcttattccttacctcttttatctcttttccccttccattagaatttgaaaagccagatacatacatgtgaccctgttctggccaaagaaacttaagtttctgagaaagataatttgcttcccaaggaaaggggtgtatgaagagaggtcattgacattgctcttccccacctcccctttttcaattgtggacattgttgtgatgatattatacctggaactgtagtggtcagtctataactacaagggcaaaaccctaaaacaatgaggtggtggaacacaaggatggaaagagactggttcatgatgaccctgtttagcaaaggaatgaaccctggaaatactttcctccatacatatgcataagtaaacaataaatgcttttttgtttgctgctcatggattttctattacttgaagctagatacatcctaatcgatagaatcacatgttgaaagagtctactatccataattatctcaataatctgtttgaaaacatctattggggccaggtgcagtggctcacacctgtaatcccagcattttgggaggctgaggcaagcagttcgcttgagctctgaagttcaagaccagcctaggcaacatggacaaaccccatctctaaaaaaaaattaaaaacaaaattacctatctatctatctatctatctatctatctatctatctatctatctatctatctcaacattctcttggtgagttttctgttatctgtcctgaaatgagcttcaagaatctcctttagttttcctttcctgagattttttttttctttaaaaacaacttcttactcatcttccttatatgctacatccttctggtactggctgtgaatacttttacagtgatggttttatcatctttatggcaatctgactcatatttaaatttcatcatattttgcatctggactaacataagatattctgtattcaacgacatggaagacttgcctgatttactgagaaattgctaattttgtccctttagggagttttaacaaactcttcacctacaggatagttttcctttccaaagttcacatttcataggaattcatgaaacttattggaaaagctggcttatgggaactaggtgtatccataaatcctcttgatacttcttgcaaaataatattagtagtctaagttgttatttttctgtccctgcctcctaagttactgatcattggacttaaagcatagatatttaataaatatgggactttttattctagggaagaagttgcatataagctgctaatattcaggtagaattttttaaaaatttgctgaggctgagtgtggcctagcatggtagtgaagtccctgggaccataatatttaataatagagggcttcatatattttacagactttttcctcctgaggtcccaccaggtactcagagttactttgagggaagattagaatgaatcctaagaaaactgcccttgttctctatagtgctagctgggggaaggaatagtagccactctgagattgcccacacctacctccctaatcttcatatggacaaatgccttaatctgcaggaggaagagtaactaaaattgtagcctgagagaactggtgcaaatccactgcgtcttggggaaaaaaacaggaaaaataaaaatgttctactctgggaaggggcaggaatgtaggttttgtccagcaatacttccggaggagaaggaacacttaggaaaattacaccccctattgtgacccaggttcacaatgcctgattaagaatgaagctgaatcagaatattagatgctttccacactctttagccctaccccaccatgtacatcaaataaaaataattgtgacatacaactgggaaagctccaacaaggagtttctcttttgagagaggtgcaaagggatagcccaaagcaaagaaggaaggcttctgaaaaattactgcatacattaagcacagggtatcactagagaaatttgaattctgaaattcactgcgtgtaatcatagcaactgcaaacatcaaaaacagcccaacacctgattagattaacacaacccccttccctacgctaaacatttagcagaacaaaaggctcactcatcgtcaagcattaaaaaacatttacttccatatctactgtcaaattttttgttgaaagctggctttcaacaaaaaattacaaggaatacaaaaatgcaaaaaaaagtcatttgaaaagacacaaatcagagcccgtctcagatatgacatagatattggaactatcagaaaggaaatttaaaataactgattagcatgttaaaaactctattggaaaagttagacaacatgtaatggcagatagataattttagctgagaaatgaaaactgtaagaagcaaaggaaaatgctattaaaaaaaccccacagtaacaaaaataaagaataccttcaactgactcactagtggacttacatagttggggaaagaatcactgaatttggaggtaggtgaatggaaatttcccaaaataaaactcaaagagaaaatagatttgagaaaaccgaagaagatcagagcatccaagagctgagacattatcaaacagcctattctacatctaactggaatcctaggaggagaaaaaagagaaaactagtcagaaaaaaatatttgaagaaataatggctgagaatttcccaaaatttggtaaaacgacaccaaattatagatccaaaagctggaagaacatcaagcaagataaatgccaaaacctcacacttcaacatataatgtttttaaaagttgaaaaccaaatacaaagggaaagtattgaaagcaggcaaaggaaaaaagtcatattatctgcagaagaataagaattatagcaggctcctcatcagaaaacatgcaagccagaagacactgaagtgacgtatttaaagtgcaaagaaaaaaattgtcaagccagaattctatatttttcctaagtggaaagaaaattaaacgccttctcagaaaaataaaaactgagagaattaatggctatcaaatcgaatctaggaggaatgtaaaggaatctcttcaagtcagaaggaatgtcatatagatcaaaaaatggatctacacaacgaaatgaggaacatcagtaatggaataagtaaaagtataataaaatattttcattgttattattattataattctgaaacagagtcttactctgttgcccaggttggagtgcagtggcgtgatcatggctcactgcaacctctgcctcccggtttcaagccattctcctgcctcagtctctcgagtagctgggattccaggtttgcgccaccatgcctgtctaatttttgtatttttagtagagacagggtttcaccatgttggccaggctggtcttgaactcctgacctcaaatgatccgtctgccttggcctctgaaagtgctgggattacaggggtgagccactgcacctggtctccttatttttattcctctaaaggatagctgactgtttaaagcaaaattgtaaaaatatatattgtttttgtaacatataatcaagtgaaatttatgacaaaaatgatacaagagatgggagggaggaattaggaatctactggtttaaggtccttatactacacatgaagtgatgtaatattatttaaaggttgacttattttgttaaaatatgtaattataacccctaggaaaatcacttaaaaagtttaaaaaagttataattaataagtcaatttaggaaataaaatggaataataaaaatgttcagttcagctcagagatggcagaaaaggaggaaaaaagagacaatgagtaaattaaacaaatagacgacagctagcaagatggaatatataaactcaaccagattaataataactttaaacatgaatggtctaagcatgccagttaaatgtcagagattttcagataggataaaataacaagatccatctgtatgcaatgtacgaacaacaacaacaaaacactttaaatataaagaattatataagttaaatgtaagaggatatggaaagatataccatgacaatgctaactgaaagaattatggataactatattaactttaaacaaagcagacttcagaataagaaatattatcagagacaaacagaggcattgcctaataataatggagcaaattatccaagaagatataatcctgaatgtgtatgcttgtgatgtgacctcaaatacatgcagcaaaactaccagatttgaaagagatagaaacaaatttacaattataattacaaacttcaacactcctttcttattgacaaaacaagaaggcaaaaatcgttaaggatatagatggcctaaaccatgctataaaaattatgtatttgacctttatagagcactccaatcaacaaaaacataatttttatttttctccagtgaacactgaacattcacaaagatagactatattctgggccataaaacaaactttaattaatttaacagaatagaagttatactaagttggttcttggataagaataaagctaaactagaaatcaataacaaaaagatctattgaaaatccttcaatatttgaaaatgaaaaaatactcttctaaataaactcagggtttaactaagaagtctcaaggataatttaaaacaaaacgaaacaaagcaaaaagcatctggtacagataaccaaggggaggagaaaagctagaatgaaccatgttgtattaggttatagtcagagatgttggtacgatctcatgtttagcttaatataaatgtaaatggagagatacaaaaataattatagctaaatgtgtaaattagctctttctgttaagaactagagtcagtgacacttcagtggcaatgagcatacagagaggtttctaaacacagttcttctaaaaggaacaagggactcttaagacatggccagttctagggctggacaggaaaatacaagatgtgcttgaaatatctagtagtgtcagaaaataaataagtgctcagaaacaagtttacagaagccaagctgaaaaatgcttcccatggccaaaattggaacaatttgagcaagaaaataaattatgtggcactgggctacaacacaagtataaaataaatacacgtgcatctacattgatataaacaaatgattgaaaaataaataaattgaaggagaccaacctttcttacagaaatattacataatctatgaaatattgtctcctctagggggtcaagcttaactctctctgccttgagtgtggactgtactttgtgtcttgcttccaaataattgaatctgcaaaaggaaataaagtcgcttcacagtggagaactctcataaacactgacttgcctaggtgaccaaggttaacatcaccagtgatgagtcatgttgatagcaagtaacctctgataaaatgagatgagaagcacacttcaactctgtggccttcttctccaaaacacctagccacatttgaatgagaaaaccaccagacaaaaccaaattgagcaacattctacaaaatacatgaaagctactccccaaatctgtagaggtcatcaaaagcaaagaaagagtgagaagctctcccagacaacagaagagcatggtaaggagacatgacatttcagtgcaatgtgatcctggaatagagaacaggacactagtggacatactagtgaaatttgagttatgtctggagcttagttaatagtaatgtatgaatattagtttcctagttttgaaaaatgtattatgtttatagaatgtgataacaatagagaaaactaggtgatgggtacaaaataattctctgaattatccttgcagcttttctgtcagcctaaatttactctaaaaattgttaaaaataatttgaactaaaggaaaatgcaacatatcaaaatttgtgggatgctactaaagcaatgctgaggtacatttttagtgccaaatgcctctattgaaatgaagaatgagccaaattcagtaacccaagcttacaccttgagaaattagagaaagaagcttagagaaagaagaacaagttaaaaacaaagcaagcagaaggaaataaataataaagattagagcagaggttaatgaaactgaaaacataaattcaatagacaaaattaatgaaaccaaaagctgactcttttaaaggatcaatataattggtaaacctcttgcaaggctgattaagaaaaactgacacacattcctaatagcagaaatgaaagaggggacatgactagtgaattcacaaacattgatagaatagtaaggagaccttataaccaattgtatgcccataaattcagcagctttgagggactggatccatttattgcaagataaaaactatcaaaaagaatattagaaaacttgctagttctatggctattaagtaaattgaatttttagtttaaaacctgctaaaggaaactctaggctcagtttatttcactggcaaattctatgaaacatttaggataaaatagtcccagttcttcacaatctcttccagaaaatagaagaggaggtagcactttccaactcattttatgaagccagcattttatgaagccagtcaaagatgctataagaaaaataaactctagatggatatctcccaggaacataaacataagattcctcaataaaatattagcaaatcaaattcagcaatatgtaagtgtgagactcaccccactgatgaatatctagagctaaatgaaagcaaaaatgtcttcattcattcagctattttaaaaaattaaacacacatttattcagtatttactgtatgttagaacatatatcgggctctgggggtatcacttaaacaatgacaggaagaagaacttctgttgtgacccctggagaaagagatcagtcataaccattggtgaattccttttaggagacacaaaaatgacaagacgtatgcatgccatcttcttgagattccactatattgctgtgaatttgatgttgcttatgaaatctttggactcctaatgataggtgtaagattgaaagaaataatcacaatgtctagacaaatttttatgaagattctgaggtaggaggtaaaacttaaggctttggaagcatataggaacacattcagtgtttccattgcaggatgaaactttagaagacagaagatctggaagttgaacagctgctgtctgtaaacttgaataaggactgaaataacttttggctaaagataaaaaaaatgatatgcctgcaagaaatgtatttaattggcatctaggtaacttggtcgagagtgatttaaattaaatgtggaaatgaagagaggatttggtccagataaacatatgactctaatttctatgtgtcgagcacagagcgggaaggcaagactgagagtttttgtggcatccagtgaaccactgtggcattcagtgattcagttcctaagaaaacaattaggaaaaggcccaggaatgctagtggtaattcagataccaattcaaagatcataggaaatatggaaagtacattgagattataacttgggaaagtataattggtcttatatgtatcactgagtcctggtaggatagaagtcaactttggaaatggtggaaaggtatgtcttctgacaagttcaatcagtggttttcaataggaaataaagagtgagggtcgtgagcatcagagtttcatgtggaattttaaaagatctgactgagtatattgctcattaaagttattaggtgggtataaatagtatagcaaatgattagaagattataatagtcattagtgttgctcaataatattttgagttctactcttgagctcagggaatatagcccttctgtgcctcttctttaaagttaatgtgactttctatgatgaatgaaagtgagcaaagtgaacaatgttatcaggatttggagcacatttgcatgagtgagaaataaatgattgctgtattaaaccatttagatttaaggatgatttgttaccattgcataatctagcccatcttcattgatacaaagatgtatgtcattgtaaaaatttatagattggtgacaatatataatagatgattacagaagtggatttcaaccaagttttaactataaaaatgttttctcgaatacaagcttacagagattcccagtatataaagagataaattatgcaaccgctttgttagaagcaaagctgcactggtctctagccagcctttccacttctcccctcaccagactttaaggcgtctgaggtccttgtgcccaatttgtagaacctctaaagcataacaaaacacagttgaaaaaccatagctataggaagatagatttttagctcaataaaaggaagtactttcagtcagaaatgtccaaagatagaattggctactaaagtagtgagctgctgtcacaggaagtgttaaagcaccgattggttatactaggcagatgtagtgatagaaggtattctgtcattggctgaccacttctagcatcagaggttttgattcttaggcctcttccaatggataacctcttctattattctttatctctttctccgccttatttttcttcattaacattatcacttgtttatgttatataaaaattcatctatctgtctagctagcagtgtactgaacaaattattaaattttcagaaattttttgagtcagttgttaagcacagacattgttaaaaatcaaattatttaaacttacaattaaattatatcaaaaactaggtaatgacactcaaaatgcatcactttctaattacttggctacattttgctgttacctgtgctcttgagcttatttatatctatcatgtctgtatggtggatatattatataatgatgtgctatataatagtgtgctatgacactgagtttctttaagcaagtttctttctttcgttctctgtttttttgagatggagtctcactctgtcacccaggctgaagtgcagtggtataatctcagctcactgcaacctccgcctcccgggtttaagtgattctcctgcctcagcctccagagtagctgggattacaggtgtctgccgtcatgcccagctaatttttatatttttagtagagatgggttttgccatgttggccaggctgatcttgaactcctgacctcatgtggtccacctgccttggcctcccaaagtgctgggattacaggcgcctggcctaagcaagtttctttaagcaaacatttgggatatgatgttgagtttcttgcttaaagaatgtgtaaagcacttagtatgggcctcttacacagtaaaacttaaatgcatgtcaactattaagtttttataccttatatgaaggattttaaggttcacgtctatatgcaatgtagaattttaagaatgagaaagggcggaaaaaccagtcatcatttgctgagcctctaccatgtgccacagactgttctagagaatttacactaatggtcaaattaacccttcatagtcccatgagagaagtataatttggtataactaataccattttgtaaatatgggaactgacagaggcttatatatagccacgtcttcatgtctaaattgaggcagaatccagatgatagcccacttatttttgactccaaatttcattttgccacttcctgggttgtactggtaagttctaaatcacaccaaaatcaatagagaagccaagcccaactttgcatccatggtgttacattggtagtttgaaatcagttatggtgcaaataattacatcacaggaatcatcaaactctgtaaatcagagcctcatccctggagaactgcttgttaaatatttaccagcacaccactctatccatctatagctctcaacgcctctggaatttaacctccataaagatacagaacataactttgttatggtctttgttgtcagttctcaacaaatatttacttagtgaataaattaataatcaacaaataataggacaagcaggaatttttaaataagcaagttgagaaaccagggaacatgaatgggaaggtttagatgagactgaaattgctttctgtctttttctggtatgcctgctttggctgtttcatagggcagtacataggaaatggcatctaacactcttcagtttgtgtatagaaatcatccctctctgttctccaaagagagcttcccaaagcaattcctgagccattcacaagtttctgaagaaaatttgacatttttcctctcttgtggtgttcatcgtaagtgtatttgcaagcaggagtcctgattttataagcagagaaaaaattttaacccagaaaagtgttaattttcaaaatacgatatcggcaaacctaaaggagaagccaagaccaattaggtggccctcagagaaggctgagcaagtgaaaaataaaggcaaatccaaccatcttgagtaggtttcactgaaaagttctcttgattgaaatctattgattatcttagtgaagtcactagaggcatcaacttttgaccagtttggccacatttaaaaaatgttttctgaggacatttgcactgctgtagactggggtacatgagctggagcactacaggcagtttccaagctgtctacatgttaggtctgcatggcagttcaaaaaattgaattaatgtccagaaattaaatatcagaggatttctactaaaaatctggatttctgagttgtcttgaaaattcagtatatccagtaacaccagacctgtattcccacaaggcaaaaatccacttgagtgaagtagctttactctcttttttttttatttatatatttttatttttatttttttccgagatggagtcttggtcttgtcgcccaggctggagtgcaatggaatggtctcagtttactgcaacctccgcctcccgggttcaagcgattctcctgcctcggcctccagagtagctgggactacaggcacacaccaccacacctggctaatttttgtatttttagtagagatgggattttaccatgttggccaggctggtctcgaacttcctacctcaggtgattcacccgtctcggcctcccatggtgctgggattacaggcgcaagccactgcacccggacttagtagctctgctctctttagatgggtcatacattctccaactcaccgctatccttaccatgtccccatgtcctatacatggtcatctctactctgtaagatcatttatctggtcttgtcttcctctgatatcgcctcagagtcattttcctcatgtaatattgattacatgtgatggttgggtgactagtgagggctacagtctgttgtttagcatccagtaattcttctgcgaggctgttaaccttcctggttttcattttcctcaggtgtaagtgaagtggctgaaccaggtaaacaccggggcatcctattgctctggccttctatgctcacacatactaagctaagcacttgtactattctctgacagctttttttttccaactcctctacatttttgtttcaactcctttacttttttgtttcaactcctttacatttctatctgtattgctatatctctctttctccatctttatctctgtctttatcatcatataaaagattattgttctcttactctctattttagagaaggatgcctacagcttatccatggtagagaggaagggtgttggatcttcatgaaggcaaaagggcatgcctgaccgtccattctccattcttccttcctatgagagacactgctttctttgtttatagtcttcatggggcttaagcagtaaaacacgctgattctaaaagaggattccagaactcagggagaagacttcctttttacttccgccatacttcctgagtataatttgctcataatataaacagatcaactgctggaaatgtcactgtatactttttaaaattaaacataccagccagcaccagtttttttttttttaatcattaagctaccatggtgatagatatcctagacacatgtatataaacaacaatttacatttttctatatatactgccctagagattatttatatatcatgtattgtatatacaaaggacaaagggcttatcacatttaaatggatagcttctgaaacagtatttctcaagtctggttcacagggataaagatactacctacaggccgggcacagtggctcacacttgtaatcccagcactttgggaggctgaggcgggaggatcacctgaggtcaggagttcaagaccagcctgcctctactaaagagacaggggcaaaactccatctatactatactaaaaatacaaaaattagtcaggtgtgatggcccatgcctgtgatcccagctacttgggaggctgaggcaggagaattgcttgaacctgggaggtggaggttgccgtgagtctggatcatgccactgctcttcagcctggacgacagagcaagactccatctcaaaaacaaaaacaaaaaatactatctacaattcattagcatcttcagtaacttgagaaccagagtatatggggaaagctgacgaacaaccttactggcatggattttgttttctttacaattcctatatttttaacttttattttaagttcaagggtacatatgcagatttgttacataggtaaacttgtgtgtgtgtgtgtgtgagagagagaggtctgttgtacagattatttcatcacccaggttttaagcctagtacccattagttatttttctacctccaccttctgaaaaggcccagtgtgtgttaccttgttcccctctatgtgtccctgtgttctcatcatttagctcacacatgtgattttattttagcacaactcctgtagtgtacttttgcagtattttctaccactttggatataaaacatcattgcaaaaataaatgcattttattttagtgtcatagctagctgggtagtacacagttgtttgaagggattgggttttttcctcttgacttccttttttgttcattagaagtgtatgtcttgccagtgaaacctccgcatgtactttttatttagagtccgtaagaacggacattatttttcaaaatgggtaaaatatttcactaatgcatttgttattttgtgttctagatcatcaaaaaaatgaatattgacaagaaatttaattgccccttgcttgtggaggaggacagagattatgtggaaataaaaactatagtagaaacacactttcaagcctttataaggtgtctactttagaaataattttgtttagaacagtttacattttgatctaattaatcttttcttcttccttcctttagattgtcactatatatatacgtatatgtatatatatacgtatatgtatatatatgtatatgtatatatatgtatgtgtatatatgtatatatatgtatatgtatatatgtatatgtgtatatatatgtatatgtatctatatgtatatgtgtatatatatgtgtgtatatatatacatatacatatatatatgtttttttcctcccatttctttattgtaggagcagatagtgctagtgatcgatttagccctgaaagatgacttgatagtactaggttactctaatagcattcctttactttctttttcctttaataagaaaggcaggaaaaaagaaattctgtttttcttggtgtttggaaaagcttcactaatgttaattattcttactgattcataagctcaagaggtttctgttgattaaaaatgacaattgcaagcacagtttctgtggaaccaaaaataccttgaagctagtaagtgttttgtataatttcattgtgttggatgatgaacttaaaaaggttgtattaagaaaaataatttattgctgaaaatcagttgtaacttgtggcttgtgcagtaggtgtgtaagatatcgaatttttgctgtatactttaggatttggaaatacttagactataagctataaacttaagttatgaaataacagttataaaaatctctatattatttacctccagctttccaagattagatcttttgttagatgcatgttttgctgtgattttattttattattttatactttcattcaataccaatgattttttttttttagtattctcctattatctttttctttaagttctgggatacatgtgcagaacatgcaggtttcttagataggtatacatgtgccatggtggtttgctgcacccataaacccatcatctacattaggtatttctgctaatgccttcccttcccttgccctccacaccctgacaggcccctgtgtgtgatgttccccttcctgtgtccatgtgttctcattgttcaactcccacttatgagtgagaacatgcagtgtttggttctctgttcttgtgttagtttgctgagaatgatggtttccagtttcatccgtgtccctgcaaaggacaggaactcatccttttttatggctgcatagtattatatgatgtgtctatgtgccacattttctttatccagcctatcattgattagcatttgagttggttccaagtctttgctattgtgaacagtgctacaataaatatatgtgtgcatgtgtctttatagtagaatgatgtataatcctttgggtatatacccagtaatgagatttctgggtcaaatggtatttctggttctagatccttgaggaatcaccacactgtcttccacaatggttgaactaatttacactccctccaacagtgtaaaagtgttcctatttctccacatcctctccagcatctgttgtttcctgactttttaatgattgcaattctaactggcatgagatggtatctcattgtggttttgatttgcattgattttaaatatatataaaaaaaataagccaagtgaagttagtatgtgtaaattgcaccacatgaggataaaaaagatggctgaatttcatagaaaactatattgtggcatctaaccatatccttaagactcagttaataaatacttctgttttatatgtatatgtttgtgtctgtgtgtgtgtgtacgtataaaatggtgagaagtatgaaaaagttgtaatagaagcaaatgaacataaattcctcaaaagaaagatagattggaccaagacatcatattcaatgttgcacactttaaaataactgatttataataaaagttttaaaagaaaaacatatagttatactaattaagcttgatgtacaaaataataccaaattggatttaaaaagaattattttcttaagatactaaaaaattatcctgatttttaatgagtagttacaattttattataactttttaaaagtttgtttgcctttagcatttcttaatattattgtaagcattaacaatactaaacaaaacaaaaaagagtttgaagattcagtcgagacaaatagaaataacagtaaaaaaagttcccagaaaatgcgagctatttaagggcatgagccatctcttatgttattttggttaaataaatgtctcagatcgttagctacgagaccctgtgctgggcactggatgaattagacacacttcctctgtccaaggtcagatgaagtggctatctttgctccttatgtgcatatttttcacctctgtacttttggtacctagcatagagctgaactcgtaaaaggcagtcaatatccccttgtcgcattgaatcaaatgtttgttgttagactgaacaactgaaatttcggaatcgctatgttgagtcattttgggcttctcagaaattttgtaaatgaaacagaatacaggtgtagggtattttgaacttgctaggatgcaaattatttaacaatattcgaatgaaatcattgtacttagaggccaggcacggttgtttacaccggtaatcccagcactttgggaggctgaggtaggtggattgcctgagctcaggagttctagaccagcctaggcaacatggtgaaatcccatctctactgaaaatacaaaaaattagctgggtgtggtggcacatgcctgtaatcccagctgctctggaggctgaggcatgagacttgctttaacccaggaggcagaggttgtagtgagccaagattgtcaccacttcattcactccagcctgggtgatagagcgagactctgccttcaaagaaggaaagaaaaaaagagagagagagaaagaaagaaaaggaagaaagaaagagagagaaagggaaaggaaaggaaaggaaggaaggaaggaattattgcacttagagttcattgccatttctagttatgttaatgcttagtatagaggagtctggggtaaggtacctgtgtgatcttggggaagcagcctactgtcctcaaactagggatttctccatctttaacatgagggccaaaaacgggttatgaaccagaagtcgcagtcatctaaggcttcaagggaggccttgaattacttagaatggtatgcaaaatgatttaaatatgtttgaaaatatgtttttttacttggagaggatccaaacttcaatagattctaaataagcctatattgccatctctctggtctaaattatctctagagtttattttacttcgaaaaatagtttttagtgtaacatacaaaaattttaatcaatagattaaaagtaggcaacaaaccatcaacatgttattatataagagaaattccattttggattgttgtctgttttctaccctgattgaataattaaaccgtcaagcagctaatgaacatttattgataattattatctattctgagtggcaataacaaaaggaaatagtgaaagatataccaataactttcttcaaagaatccattatctaattagaaatattaaatcaacttagtctttcccttcgatgtagtcatggaggtgaatcttacaccatggacaattagagggagctatatttaagactatatgggttttaagcgaaatagatcatttctagggtatttattagggagatactattttcaagatgttgtgctaatccagtcatgccaggcatatttattgagtattgacttgccagacacaaaaaaacactaataaatactatgtatggtctctcaacattaagaaagtggttttttttgcaggaaatacaaaaacaaataattatagtgtttttattcagtattataattcatatatgaaagagttgcatgggagaacagaagcggcactctaaggtgacccctttttgtgatccctggctcttagtagtttgaagtcttattgagtggtataataaaacatgcaaacaactaaaacataggacaacatatattgtatcatgattagctgcaaattgccatgctgtttctgaggaaggaggtatatttataccaactgtaacaaggaatatttaattcagcagatatttattgttactggatttaagtcctataatgttcatccgacttgttattccaagcttaagatggtacttagcacttggcatgtattcagtaaatatttgctgaacagataaatacatgaagacccacttcatgccaagaatagtgcaaaatacccacaaacatagaggcagagaaaaataagtttgtgccctaaaaatgctcacagtcatcatatacatgcgtgtgtatttattttcaaatcactatgttacatggtaatagagttgcatgcagagcacaagaggtacttctgaatcttcacagaagagacattgacattctcagagaatgggtggcgtctaggaggatgaataggagctcatgccaggaagatagggaagtggaggaaggagttccagacagagggtgttacatatgcataggcactggcatttgaaagtttatggatttgggggataactatcaaatgtgtaggatgtatatgggtaaaggaaaggagaaagatgagactggagatgtagaccattggggaccatttcttaaagggccttttctgtcatactaaggagctggagtcattctgaaggcctgaggtacactgaggaattatgaagaaaagaggttatataggaggtatactcaggaagtttccagaaagagtgaggctgagaaggcccagcttccaacacacgagagacatacttacacttcctaggaaggcccctagagaagagaattacaaagattcatttgctggcttctctttcatcatttgtttttatcatttggagcctggatactccaatacctatatggcaaactttgccctttccttccccaaggtacagctgttaagagagtgcatgaaaatttcccactaccaaatgccatgggtggttatgagaagcacctcttgttaacagttaaaaagtaaaatacattttggactttcagcttttcatttcctacctatgggacatggaagaatgttcattggtgtatataaacttgagtttcttaatgtgaaaaataaggataaaagtttttaagtatatatatatgcgtttaatcagtctgttgaattaagtcagtaggtgttgaaagacaggatttgttttttttcccttaagtctgcttttatcttacatttgcaaataagaagttttgtatccaaacatattattcttccaaaaattttaaggataaagatgtacttttaaaagaagctataacttagcattttcttttggttaaatataattattctaaaaatggcatatctctacattatgtttgcttggtaaaactgaatattactcgcctgtttccacagtatgacataagtggaaataagacaattatagaacatcttcataacaaagttaccatataaagcttatatgagtggatggcttaattagattgtttttaaagtttcaggtagttcagtttcttttttcctggtttttactttctgtttgaccttcagagaaactaactgtatttacctcaaacatttcttatccacatgtcttcaatatataatcataatatttggtacatctgaagtgcctgacatctgacgcttctgaattgcttcataaatgtggatttaggccttgggggccagatggcaaaagtcaacagaataaaagtatttattaggtattcatgattgtactgggtgctgtactggataacaaaattgagaaagaaagtattttctatgatttcaggtatcctacaatttagctaggcagtccaaacacaaatacatttttgaagaggaataaaagtagtgcgcatggaagtgtttggcatcgccttgatgatagatctaacattaccaaagaaatgttgtctcagagctggactctcgcagaccgttgtgttctcttagacaaatggaagctttccagctaaaactggcttaattcattactatttacttggtagccaaaataacttactgccttattttgtgttggatttgaaattcaaaaaaaagtaaacaaaacaaaataaaaacaaatttgagtttcttgtaatttattttattatagggagttttgttccaagactgtttagtgaccaaaaccaaaaaggctgctgtctttaatatgtagtttattctccccacaaacacattacttgaacagcaactaaaaaaagagataaaaagaagtggggaggatatactaggcattctcttcttcttggctcaaagcttagaggttgtgaccagctggacagctttccagaaatcataagcagatactgggccaattgtttttattacagaattatggaggaattctgaggtgtaaatgatttgtaaagcagctctatttaggagtagttttgcggaggtttggatcaattcagtgggttgtagtttgacatatgaagtgataactgtatgcctagacagtcccagctgctgaatttgcaactacagtgaagagttctgcccacccccatctgtctaaggggcatctccacctgtcatttctgtactctggcctctatgacatgataaattgcttttaattagaattgcagacaatttttcattctctggataatgtcccagcgtacaacataacatccaacataactttggcagttcagaagtgagcttaaacaacatgcagtacttctctccacagttataaataattgtaaataatttgttgagaaatatacactcattgcaatataaacatgaaatgcctttatttttccaatctaaatttttagccctgctctgtggatcattttctagcatcctttaacaaaatcttggctagcttctatagcttcctagccacttctcagttattaagacttagtctagcccagtttagaacttcagtctcgtgtgagtcaaagctccctctctctacagcatgggctggagttgtaaccctaactttattgtaggggtgagatatggtctggctctgagataccgtcaatgttttactctttgagatgaataagctcttctggtttaaggaaatgtgggcggaatgaaggaatagggaagcagagctcttggtatagctggtctcatattgatgatgctgaacagtgctcctgctgtcactgtattccatccagttctggtctctgtccatgtagagcgatatccacctaagtgctgtgcatggtcctcggggtgtcagctttacccctgcaccctttatctttaatgactctttcagattgaggaagtcagatttttcttaagttctgcatctcctttctccggatgggtgtctcattacaggaaaccatgagaactcctccaactttttctccagtccctatgcaggggcttagagaatagggaagtaaattaccatcttgttcttcaaagccacactgtatcttagtatctttaagctgtgcctggctggccgcctcctccgtgggcttttcctcttcagaaatcaatttttcagaagagggtcccaatccctgtgttcacatatctttcaaacttcaggtgttatggtctaagttcttactaatcttgtttgactccatgacagcactaggtaggcctacaggttgtttccacccaggaagcatccaatcagggtggatgtcacgaccttccagtctctatcaatgggtctctaggagccactctcccttaattccagtgaggagaaagcacagagagaggagggtgtggtttctgtccatgagctctgcatttcccaacccctttgggggctgacaacaaacttcactagactgggttaagtatagaataaagtatattttaatagataaacatagggcaaggttgtggaattcagagaggcaaaaatgaacacagttgagaaatcgtagaacatgtttggagacaaagaaataggtcagtttggttgtggcataggaggtaataaaaatcaagtttcagtaagaacaatttctgacatatttttaatggccttgaatgctaggttgatgagctttgagttaatttaatttatgaagggttaagaagctaagatgctaagaatgtagctgtgaatgaaacagaggggcaaattcttacaagtttggatattgttgcctacattgtatttccaaagctttctggagtagtagcaagtgattctgaaagctctagaattctagctgtgtatctagtgttagttagagttacttcatttatagttatagagaggaatagttttcatttcagttatctggcacaaatggagtgtttttatcataaatttgtattactagcaatttctcagcttttggcagataaacttaataagacataccaatccatgataacctttacttagagttacagggaaaaacagtacattctttgtgtatggtaaacaactctttcctggtattgattcaatgtgggaagaactgtaacaacaaagcagcaatatgacattaaattcttgttgaccacattatctgttgtagatttaaaaaaacctgttttctgctaacagtcataacattttctaatattgttgggcaatagcattgcttgcttttgttatgatcactgttctagatactgtagttgtcatgacaacaaaataacactaataataacaacaatatataacatgtattgagctcttactatatgtcttccattttgtaaaacattttccatgggctcatttgagccccacaacaacttcatgaggaaggtactgagggaactgtggcatagggaggttaagctttttgactatgatcacatcacatgtaaaggtggagccaggatattgttcaggcagtctgaattcaattgctgggctcttcaacatgacagctatggctggggctgtacagaagtcaggattgacattgtgttatattcaaacatatgagcagattggatggctgtggccttcagatctttatttaatacaagttgatggggctacctctttctcttagcctctttccttgctgaaagtccctgaatccctttgtgattatagcagaatggatatctctaaagcgtggtgacctggtgagttgtcatgattttctgcagttctcagcagcctgtgagtggcacaactgaaatcattgtcctttcttcattgtcactcctaccttcatgtaagtgttgaacacatagagaactaagaagcagaaggtattaagggaaagtccggaaaggtggcagttctttagtatactatcatcatttgacatcaagccctgagcttggaacatttggaaactcagctttattagtacaataagagctcagcaagctcaggaagatgacttcatccaaattaaatgaatgggggagttaatgtattgattaattttgtgaattcataaatcgtaagcagatgactgggccaattgtttttggaacatttggaaactcagctttatcagtacaataaaagttgagcaagctcagcaagatgacttcatccaaattaaatgaatggnnnnnnnnnnnnnnnnnnnnnnnnnnnnnnnnnnnnnnnnnnnnnnnnnnnnnnnnnnnnnnnnnnnnnnnnnnnnnnnnnnnnnnnnnnnnnnnnnnnngttaattttaaacaataagatggacccatgcttaagtgtacagctttatcatttgttatttttgagacggagtcttgctctgtcaccaggatgatgtgcagtggcgtgatcttggctcactgcaacctccaccttctgggttcaagcagttctcccgcatcagcctcctgagtagctgagactacaggcatgtgccaccacgcatggctaatttttgtgtgtgtgtgttttagtagagacgggatttcaccatgttggccaggatggtctcgatctcttgacctcatgatctgtctgcctcagcctcctaaagtgttgggattacagctgtaagccaccacgcctggcccagcttgataaattttgacatatatgtctgtgaaatgtcaaccacaatcaacatgtaggcctttctattatcttaagagtctcttgtgccaacttctagtcacttcttatgccctactctcagcccaagcaaacactgatatgctatcaccatagattaatttttctttctaaagtttcatataaatggaataatatatactcttttgtggctggcctttcttattcaacaaaatgtttctgagattcattcatgttgtttcatgtactaatagttcattcatttatgttgctgacaatatgttattgcgttgatatatgacaaatcattcatccatttacctttgttgaacatttgaattctttccagttgccagctattatgaataaagctactctcaatatttgtgtaatagtcttattgtggatggaaggaagtttctatttctcttggtatatcagtcagggtccaatcaagagacaggaaccacaccatttaggaaatatttaatttaaaaatattattaaaatcacttaatagataataattattaatagaatactatcattagaccattggagtaatggaaaattggctattaagaggtaaagagaattctagagaacatgggattagcagaatagaaagaagcaaccactctatttgagagggcatgctcatggctcaatagatagtggggtatttctgtaaaatgtctcactaacaggactccactggctatttgccttcagaagtgcaaggggtaagtgttgatggacaggaactgtacttcagaactcactggagagatactcaaggaggggttgggaagctgttgaagtggaggtgccttacttgtcacactcactgggaggtgattgtctgggttaccaaggaaagctttttacccagagcaggttcacagtggcactccataaggatgcatcctaaaggggtttcaggggaagctgagaacagggaggtgccaggctagcagtactccattgggaagcatcctgaggaggtgttgaaagaaactggttaagtagagttgtccggccagtgacttttctctctgggtgccagtgtatgccattcaagggaatgtgtttaacaggtggcactggtggggatcccactctatgggcccgggaggaagcttccctgccagtggcactccactgcaaaactacctgagggaatgccaagggaagctggccatgagaacatgtcatatacttttagatactgggcactgcagaaaaagaaaaaaaacaacaacacaactgtgtgcattttgagagcctgatgcaagaaacataccagaaccagaacaagaacgccccttttctctattgtctttttggaaccctctgttacaaagggttgtgacacctggcaaagaataaatataggattcagttcgattattacagccagttattgcaaattggatatggaactaagagtcaataaattggtaactgacacacttggtaaatgcataggagcacagtcactgagtcatatgttatgtttgtatgtttctataagcaattgccaaactgctttccaaagcagttgcaccattcgcattcccaccagcaatacatgagtgtttcagttactccatatcatcaccaacgcttagtagtattgccctgcacttttttttttttttttttttttgagacagagtctctctctgttgcccaggctggagtgcaactgcaacctctgcctctcaggttcaagtgattctcctgcctcagcctcccaagtagctgggattacaggcgcctgccaccatgcccagctaatttttgtatttttagtagagatgaggtttcaccatgttggccaagctggtctcgaactcctgacctcaggtgatccacccacctcagcctcccaaagtgctgggattacaggggtgagcactgtgcccggcctgctctgtactttttgtagtgaatttgtagtgcatagtgtagaatggtgtagtgaacaatgaagttattgtagtgagtttgatgcaatatcactttgtggttttaattcacagtcctctgatggtgaaggatgtggatagttattttagttggccatttgtgtatctttttatgagaagtttctgttcaaatcttttgtccattacaaaagtgaattattggtttgtgttcttatagctgagtaagagtgtgtttgtgtgtatttgtgtgtatatgtgtgtttgcatgtgtgtgtatatatatatattctagatgtgggtgtacccccaaatatatgttacaaaagttttccctcagtctgtatcttgcctttgcattttgttcacaatgagtttcaaagagcagaattttaaaaacttgataaagtctaacatatttttaacactttgtgcttttctttcctatcgaagaaatctttacctaggtaacaaatattttctttcatgttttattctgtaagttttagtgtattagctttcacatttaggtctgtgatccatttcagattaattttttgtatgaagtgagataatacttgaggttcacatgtatgtgaatatgagtcctccccttaccccaagggatgctcaattgttctagcaacaattagctaaaaagtctttctatttcccattgaattagtttagatgctgtcaaaaatcaataggccgaatacgcttgatatgtttctggattctctaatttgtttcatgaacctatgttttatccttatgccagtaccatattgtcttgattacagcagctttatggtaaaatttgccatccaacagtttaagtcctcccaatatgtactttttcaaaacagtttttgctattttagcatttttttctttttttgcatttatatacacattttttctatatatatgttagaatcatataattaatatttacaaaagcatttgctgagattttgatttggattaagttgactctatagataaatttaaagagaactaacgtgaacaatcttagtcttatgattaatgaacattgtatgtttctctatttatttaggtctttctttccacagtgttttgtagctttcattgtacaagtacacatataaattgttaaatttatttgttaatcattcgtggtttatgatgctattttaaatggtatttaaacatttattttccaactatttgttgctagtatatagaaataagcttaatttttaaaatattgggattaaatcttgagtccttgttaaatatagttattgattctaaaaggtttcttctttctatttttttaaaggaggtctgtctttcttgtctgtatggtttttatctcttttctcaccttgctgctctagtgttgaatagaagtagtgagattggagttcttgtttttgttatccgatattgggggaaagcattctttcatcattaagtaggatgttagaagagtttttgatagatgcttcttctattgatagttttctgagagttttaaaatatgttttaatcaggaactctttttctgcatctactgagatgaatgtgttttaatatgttaatgcagtgaattacactgattgatttttgaatatgaaatcagccttacatctctaggataaatttttcttgattatggtatattatcccttttttgtttagtgctggattctatttccaagaacttttgaagattttatatctattttcatgaaagacatggatttgtagttttattggtttaatttgtctggttagactatcagggttatgctaaccttgtaaaatgaaatgagatttttttctctcatctccaggtttctaaaagattttatgtaggattggcattattttttacttaaatattagatagaattattcaataaagcaatccgagttcagaaacttttatggttcttgttcagatttgaataaagaattcaatatttaattgacataggagtattcataatgttttcaataaacctactttatttccatttatttttaactcctgtttttatctttttttccttctatctagttgagcttactttgctcttcttattctacaacattaatatgaaagcttacattattgattttggatctttgctcttttctgtcttgttttctaatttaaatccatgtctctcactgtaaacactgctttagctgtttatcacagaattttatatgttttactttcatttttattcagtttaatatgttttctaatctacatttacttggggatttccatgtgatttttttctattgatttctagtataactctgttgtggtcagatacatcttttgaatgattacagttcttttaaattaatcaagacttgtttatggtccatgctattatatctcttggtacacttttcatatacttgaagacaatttggattctactgtcattgggtgtacattttataaatgtcaattgggtaaatttattgataatgttaagaattatttatacttacagattgcctgtctgcttgttttttcaatcactgagagaagagtattgaattatccaattataattttacatttagctattttccttttcagttctgccagtttttgcctcttgttttttgaagttctgttattaggtgcatacaaatttataatttctatgccctcttgatcagttgactccattatcattgtgacatgcttctttttgtcctaattacattccttgtttcgaagtctaccttatctaatgttaaaaacagtattcttatgattacaatttttgtggtatatcttttttgtcatttccttataatgtatctataactttacattttaagtgggtttcttgtagacagcataaagttggatcctgctctttatttaaagaagtttgtcaatctctgcattttaattggagcatttaaacttttatctaatgttattatagatatatttcagttttaatctaccatatttctattaattttctatttgtctttcctcttttattctttttgtgacttcttttattttagttgtgtatttaaaaatattttgtgttattcttcattattagcttatgcattataacccttttttttttttatttttgagacggagtctcactctgtcgccaggctagagtccagtggcacaatctcgactcactgcaacctccacttctcaggttcaagtgattctcctgcctcagcctcctgagtagctgggactacaggcatgcaccaccacgcacagctaatttttgtatttttagtagagacggggttttaccatgttggccagaatggtctcaatctcttgacctcgtgatccgcccacctcagcctcccaaagcgctaggattacaggcatgagccaccgcgcctggctgatttacttttaagaagttgttctagggagctttgctcaatctgagtttgaaggcagaattaaactaataccctaaggcatctattgtatataatgaactattttctttcttatgtgcccaatatggagttatttattgaccatcctttggaaaataaataaaacagtcactcacatggttttctgtgcccagtggtccacatgagagcctagggttattatagatgatctaagaaagttggcaatatgcttatcatgtttaccttcaaataacattatacctcttcacacataagaaccccaacccacctatacttctacctgtcctctcctctccttttaaaagactgtatgttttgcttatatatatatgcaaatatatatatacatttattatatacataataaatgcatgttctttttttgctttaaatagtaaattttgttttaaagaaattaaaaattagaagcaatttattttatatttcctcatatgtttacaaattttcaagctcttcattctttttttgtggactcattttcattgattcttttctttctgtttgaagaactttctttaacgtatcctatagtgcatacccactggcattaaattctcccagccttttttttttctgaatgtgtttattttgctctcatttaaaaaatatattctctaggtataaaattctagattgtcagttttttcttcatcattttaaagtcatggctccaatgactgctgcacacatattggtgtctctgtaagtaatgtatcttatttttctctggatgcttttaagtatttatatttatcattaccctttggcaatttaaatatgaagtgtgtgatatacttttcttgtatttattccacttgagtttgctgaaattcttgcaagtaggtttatacttttcattaaatttattaaaattttagcttttgtaaaagtatttttccattttccccatctttcctctcctctggaactccatacctcctagttagacctcttagttttatgcttcaggtcattgagtttttgtttattgttttcctattttttctctctctgaactccatttggatattcttttttggatatgttttcaaatttactatttttaaattttcatttcatagtatctgatctgctcttaatatcatccaaagaaattgtttttcaaatattgttttttattgttagatatttcatttgattattttctacatttaatttctctctcatgtgtaaattttccttaatattaagaaatagttataatatctgcttttacattcttatttaagcagatattatattatattatattatattattctatcttttctgccatttcagggttggtttttattgactgatattttccctgggtaacatattttccagtttcttttccatttgtaatgatattttattagatattggaaattgtgaatgttacattgttgagtatcttgattttgttttgttcttttaaattatattgattatttttccccagctgttggttggttaactgcagcttagtttgatccttttgaagcttttaaagaagttttaatagaatgagtctcgagtagccctttttctagaggtagattagtcctactacttgcacagaacttctagatctttactgattactccaagtggtcaatgaggaatctctgctccatcagaactcaaatgtttcccatttctgggtgggctctaggaatagttgaactgacagccacctgattattccgtgttcaattttgtgtcatttcaccccgcataggtatgtcttaatattcagtggattcaagaagatttctgtaaatatttctggagcccccgctttttcctataactacctcttctctataactctactgcatatgttccagcctctggagtctgcttgaaatctgatctttgcgtccttgatttggtgaggactactgtgttctgcttgggatctattttccctctctgatgtacagaacgtggctctaggcagaaagccagggcaaacataaggctaacctcatttgcctgcagtcatagtgattgcagtcctgtatcatctctttttctaggtctgaaagtgtttttttgtatcttttcccagttttctttttgtttacagtgggagactacatgtgggctcattgtttcataactagatgcagaagtctcccaatttattaatttttgattgaagataaaactttttatgaccaaaatatgcctatctattgttttaggcactatctccctaataccacttgatggatgacattaataattgaaagatttactggtgaacatgcaatcaatgtgcaaggagatagagttttttaaattattttactttaagttctgggatacatgggcagaacgtgcaggtttgttacatgagtatacatgtgccatggtggtttgcggcacccatgaacccatcatctaggtttttgtcctaatgctcttcctctcttgccccacccccacaacaggccctggtgtgtcatgttcccctccctatgtccatgtgttctcattgttcaattcgcacttatgagtgagaatatgcagtgtttggttttctgttcttgtgttagtttgtgagaatgatggcctccagcttcatccatgtcccttcaaaggacatgaactcattcattgtatgactgcatagtattccatggtgtatatgtgccacattttctttatccagtctatcactggtgggcatttgggttggttgcaagtctttgctattgtaaatagtgctgcaataaacatatgtgtgcatgtgtctttatagtagaatgatttataatcctttgggtatatactcagtaaggggattgcttggtcaaatggtatttctagttcttgatccttgaggaatcaccacattgtcttccgcatggttgaactaacttacattccaaccaacagtcaatcaaaagcattgagatagagattcttaagcgtttgcttggcttggcctcaggaaagtcttaacactggcagtcccacagatatactccttccttcgaagtagccccacctcagtttaatgcaactgccttgtcagtggatagtgtcagatatcttggagttatccttgacttctgatcttgtctttgatggtacaattgaaattctgtcaattgtgtcatcaaaatagcatcttgtcccatttccattaccatcatgctggtgcctgttctagctccctaactgttttctctgggatttttcttacaacctgcacccacacctctccccagtttgatgttggcagagtagctaaaatactgctttaaaaatgtaagtcatatatagtaatgttctgttctaaactttaataattttttatcttacccagagtcaaaaccagattccttagaatagcctacaaggccctatacaaagtagtctcagttaatttctcttttcctggtactcattgcattccaggcatagtagtgcccttgatttttctcaaacacactaggcatgattccacctcaggaatgttttctgtgattccacctcttagcattactcttctctttacttttttatttttattttttagagccagggtcttgtagtttcaaaggtgactttaaataaaactttgctcatgttaagagaagcgatgtggatacctgatgcaaaaataaaaaacaaaccaggtgcagtggtgtgcacctgcagtcccagctactagggagcctgaggcaggtggctctcttgagcccaggagtttgaattcaggctggacaacatagcaagaccctgccttgtcacctattttttatcttgccttgaatgtattttttttcctgttttaatcattgtaacatctctgttgccaaaaacaccattgggcatacggtctaactccagatatatttgttggataagtgaatacttgaagtcagatatcttaatgactagttacttgtgccttctagactcagtatttctttgcctttggcaatgttgtacaagattccagattcctgatcttgactcctttttttttttttctctctagacttcacataggccaccatgttgccatgttctcttttttgcaggcaggttacataatacagatgactagcctggagctttcttttgtattcaaacatatatttctggctttgcacagttgttattttgtctgaacttcgaagttcccaaatagactcagggatctatctcttgtagtggcttatttctactgagaactaattttgtcatttgtggtttatttctgaaagtttcattctcaaatggcaacattaatttaaattccagggcaactcattgtagtccctaggaaccactttgaaagtgttaaaaatgagttcagttcagctgagaagatttaaattcatataatcagcgtttattccctgccacctccttattataaatggtggttaggtgtataggccaacccacaaaagcctattttattcacatgaagctgatctgtagttctaatactaccattgtacatacctgatttataatcttttttacacaagaaaatgtatcgaagttttaaacagccgtgatggctatttggctgcaagttccaacacattaatctacaaacatttttaaaacatagcttgatgacaagtttacatctacttggaaatatttcatcatcttggataaaatatgacattcgatgttgattaaatattgtatacagcaattggaaattagaaagtgttaagtagtcacatttagacttaattttatagttttttcatctatcttttatacaacattttggcccttcctttcagtctgtataccgtattttcctcttttctgtctatatcttctggttagtaaatcacatattgagactgactgttttagcatttaaaagtttagcaattttgttaaacaaaaagacagaaaatttactgctgaatggcaagggaccattctggtggcctttgttttgttttaatagggtggttgagagaaaaaaagatgcagttcagctctgaaccattctgtaatagaccattattaagagagatgggaagagggagccctttacttccatttcagagatgtttgcacttggaagtatatgaattcttatgttttcttcggagctgtttgaactttattatataatgtacacattggcatccaattattcaccttcagatatttgtgtgttgcccaaatattctagcacaaatgctagaagtgcctagcatttctcaaactgacacctatgggttccctggatctttgagaacttatttttggttatccatgagtacagtaataatgtttagattttctatttcattatataaaataattgatataagatattctagattatctagatgccccttttgcactggtttacatttacattggaacaaagtaaaggtcaattgatatcacaaaaactaatgcagagtttagtcttagtttaaattgagaaaatagttgggagaattgaacaagcataagactctggtacaaagatgtaaaatacaaaagaatatgcatcatgccacatttaccttttaggtgaatgtattgagtaattaggtagataccatctttgtataaattacaacacttctttcttttgttttgcaaagttatgaaaatattttcattaatgatattttaaaatttggtattcagttttgttgtagaaagatgtggaccgtcatataaaatgaacgattggtcgtcaaaagcgagcttgctgtaaaaaaaggaaaataacaaaaattaattaatggtcaatatatgctcaaaacaacaatgattagaccaatggtaactgacatacaatgtacaaatactgtagataaatacagctttccactaccatactcattgttggcaactatcttttagaaaaaaacattatatatcacattaaattaatgaagttaaattaattgcttgttaagaaatttctccactcttcttatttccctatagagagatacacattagaaaaacacctctgacatcttgccctacccctcgtttttgcccatgcaggagtagtgaattgtgtggttggaagatgaaaaccactgatctatgttctttgattgggtagagctaatctggtgaaacactgtaggcattatgaattaaaactctctctctgttttttaaaatttttctttaagttcttggatacatgtgcagaacatgcaggttagttacataggtatacatttgccatggtggtttgctgcacctatcaacctgtcatctaggttttaagctccacatgcattagctatttgtcataatactctccctcccctcaccgctcaccctctgacagctctggtgtgtgatgttcccctccctgtgtccatgtgttctcattgttcaactcccacttgtgagtgagaacatgcagtgtttagttttctgttcctgtgttagtttgctgagaaggatggtttccagcttgatcatgcccttgcaaaggacatgaactcatccttttttatggctgcatagtattccatggtgtacatgtgccacattttctttatccaatctatcactgatgggcatttgggttggttcgaagtctttgctattgtgaacagtgctgcaataaacatacgtgtgcatgtgtctttatagtagaatgatatataatcctttgggtatatacccagtaatgggattgctgggtcaaatggtatttctagttctagatccttgaggaattgccacactgtcttccacaatggttgaactaatttacactccctccaacaatgtaaaagctttcctatttctccacatcctctccagcacctgttgtttcctgactttttaatgatcactattgtaactgtcatgagatgttatctcattgtggttttgatttgcattcctctaatgaccagtgaagataagctctttttcatatgtttgttggctgcaaaaatgtcttcttttgagaaatgtctgttcatatccttcacccactttttgatggggacatttgtttttttcttgtaaatttgtttaaattctttgtagattctggatcttagccctttgtcagatggatagattgcaaaaattttctcccattctgtaggttgcctgttcagtctgatgatagtttcttttgctgtgcagaagtgttttagtttaattagatcccttttgtcaatgttgacttttgttgcaattgcttttggtgttttagtcttgaagtctttgcccttgcctaggtcctgaacggtattgcctaggttttcttctatggtttttatggtttggggttttacatttaaatctttaatccatcttgagttaatttttgtatgaggtataaggaaggagtgcagtttctctcttctgcatacagctagtgagttttctcagcaccatttattaaatagagaatcctttctccattgcttgtttttgccaggtttgttgatgatcagatggctgtagatgtgtggtgttatttctgaggtctcttttctgttccactggtctttatatctgttttggtaccagtaccatgctgttttggttactgtagccttgtagttagtttgaagtcaggtagtgtgatgcctctagctttgttctttttgcttaggattgtcttagctatacaggctcttttttggttccatacaaaatttaaagtagtttttttctaattctgcaatgaaggtcaatggtagcttgatgggaataggattctatctctaaattactttgggccataaggccattttcatgatattgatttttcctatccatgagagtggaatatttttccatttgtttgtgtcctcttttgtttcctggagcagtggtttgcagttcttcttgaagaggtccttcatatctcttgtaagttgtattcctaggtattttattctctttgtagcaattgtgaatgggagttcactcatgatttggctctctgcttgcctattattggtgcataagaatgcttatgatttttgcacattgatttttgtatcctgagatgtttctgatgttgcttatcagcttaaggagtttttgggctgaaatgatgggttttctaaatatagaataatgtcatctgcaaacagagactgtttgactaccccccttcctatttcaataagctttatttctttctcttgcttgattgacctgcccagaacttccaatactatattgaattgtagtggtgagagagggcatccttgtcttataccagttttcaaagggaatgcttccatcttttgcccattcagtatgatattggctatgggtttgtcataaatagctcttattattttgagatatgttccatcaatacctagtttatagagagtttttagcatgaaagggtgttgaattttattgcaggcttttcctgcatctattgagataataatatggtttttgttattatttctatttatgtgatggattacatttattgatttgcatatgttgaaccagccttgcatcctagggatgaagctgacttgatcgtggtagataagctttttgatgtgcaactggattcggtttgccagtattttattgaggatttttgcatcaatgttcatcagggatattggcctgaaattttctttttttgttgcgtttctgccaggttttgttatcagggtgatgctggcctcataaaatgagttagggaggagtccctctttttttgttgtttggaatagtttcagaaggaatggtactagctcctctttgtacctctggtagcatttagctgtgaatccgtctggtcctggacctttttttggttggtatgctattaattactgcctcaatttcagagcttgttattggtctattcagggattcggcttcttcctggtttaatcttgagagggtgtatgtgtccaggaattaatacatttcttctagattttctagtttatttgcatagaggtgtttatagtattctttgatggtagtttgtatttctgagggatcagtggtgatacatccttcatcattttttattgtgtctatttgattcttctctcttttcttattattctgtgtagtggtctatctattttgttaatgttttcaaaaaaccagctcctggattcattgattttttggagggtttttgtgtctctgtcttcttcagttctgtttgctcttccttctctagtttttttaattgtgatgttagggtgtcaatttcatatctttccagttttctgatgtgggcacatttagtgctataaatttccctcttaacactgctttagctgtgtctcagaggttctggtatgttgtctctttgttctcactgttttcaaataacttctttatttcttccttaatttcattatctacccagttgtcattcaggagcaggttgttcagtttccatgtagttgtgcagtttttttgtgagtttcttaatgctgagttctaatttgatggcactgtggtctgagagactgtatgttatgatttatgttctctagcatttgctgaggagtgctttacttccaattatatggttaattttagaataagtgcgatgtgttgctgagaagaatgtatattctgttgatttgggatggagagttctgtagatgtgtattagatatgcttcttccagagctgagttcaagtcctgaatatgcttgctaattttctgtcttgttgatctgtgtaatattgacagtggggtgttaaagtctcccactattattgtgtgggagtctaagtctctttgtaggtctctaagaacttgttttatgaatctgggtgctcctgtattcagtgcatgcatatttaggatagttagctcttcttgttgcattgatccctttaccattacgtaatgcgtttctttctcttttttgatctttgtcagttaaagtctgttttatcagagactaggattgcaacccctgcttttttggctttccatttgcttggtaaatattcctccttctctttattttgagcccatgtatgtctttgccacgaaatgggtctcctgaatgcagcacactgatgggtctttatccaatttgccagtctgtgtcttttaattggggcttttagcctatatacatttaagattaatattattatgtgtgaatttgagccccatatttcttggaggctttgttcattccctttcattctttttactgtaatcttgtctttataccttatttcagtaagttgatcttcaatctctgatattcttccttctgcttgatcaattcaggtattgatacttgtgtatgcttcacgaagttcttgtgctgtgtttttcagctccaccgagtcatttatgttcttctctaaactggttattctagttagcagttcctgtaaccttttatcaaagttcatagcttccttgccttgggttagaacatgctcctttagctcagaggagtttgttattacccaccttttgaagcctacttctgtcaattcttcaatctcattctccatccagttttgtgcccttgctggagaggagttgcgatcatttggagaagaggcattctggtttttggaattttcagcatttttgccctggtttttcctcatctttgttgatttatctacctttgatctttgaggctgatgacctttggatgggtttttgtgcgggggtcctttatgttgatgttgatgtttatgttgctttctgtttgttagtttttcttctaacagtcaggccccctcttctgcaggtctgctgcaatttgctgaagctccactccagaccctgttcacctgggtattaccagtggaggctgcagaacagtaaagattgctgcctgctccttactctggaagcttcatcccagaggggcaccagcctgatgccagctggaactctcctgtatgaagtgtctgtcgacccctgttgggaggtctctcccagttaggaggcacggggttcagggatccactctaggaggcagtcagtcccttagcagagctcaaacaccgtgctgggagaatccacctcatcagtatcagctgctctcctcagagcccacaggcaggaacgtttaagtccactgaagctgcgcccacaaccgccccttcccccaggagccatgtcccagggagatgggagttttatctataagcccctgtatggggctgctgcctttccttcagagatgcactgcccagtgaggaggaatctagagaggcagtctgcccacagctgctttgccatgctgtggtgagttctgcctagtccaaacctaccagcctccttagcactgtcaggggaaaaccgcctactcaagcctcagtaatggcggatgtccttccccacaccaagctctatggtcccaggtagacttcagagtgctgtgccgttagtgagaatttcaagccagtggttcttagctagatgggctctgtgggagtgggacccgctgagtgagaccacttggctccctgtcttcagccccctttccagggaagtgaattgctctgtcttgctggggttccaggtgcctctggggggtggcggggaggggaggggaggaacaaaactcctgcagctagcttagtgtctgcccaaacagctgcccagttttttgcttgaaacccagggccctggtggtgtaggcacatgaggtaatctcctgatctgcagattgcaaaaactatgggaaaagcgtgctaggtgggcccaatagcacagtccctcacggcttcctttggctgaggtagggaggtccctggctgtttgcatttcccaggtgaggcatgccccactctgcttctgctcttcctccgtgggctgcacccattgcctaaacagtcccaatgagatgaactgggtacctcagttggaaatgcagaaatcacgcaacttctttgttggtctccctgggagctcagactggagccgtttttattcggccatcttgccagatcctcctgaattcagtccctctctgatacagtctttctctctgtctccctctctccctccatcccaactccaccacccccactccttgaaactagtacaaagctctgatcctgtgtgaattgtagctgctctgtagacctaaactttctataagtaggctgtcccaagatttggactcggacaggttatcctcacaccaagccatgttcttcaacagctttatcagtatgaaagatgatattttgctctccacttgtctctttcatttgattagttccaatcttgggaaagggaggggttaatcattattgagcctctaaaactccaactttttttttattttgtaaatttgccttagttttatggttatatgggcactagatgcaaataattgtatttatttttatgttacataaatgtaagtacaattataatgaaaataatttaagccaacaccaaaaacccctgaacatgtttttcttttaatatgcatccatataacatgtaagtaggagaaaatttgaggcagcagaattgtcactaacacactcaaactcaatcaaaataaagattaaagcaatttccccagaaacttttaaaaaaataaagtcagcaacaacaacaattttacaatatggtaatgatgataagtggtttttgaatttccctgtattcaccacaaaaagtgaaaaagaaactttttttttgcttttagacaatatgtgtgacaaaactaactgacaaaatatgaatcctaaaatattactaggtcacgtaaagctaccaacagcaataatacctgcatcatagcaacctctagatatgactacccatttcctggaaagacaacagaggaacatgttatacctctctatagaaatgcagtcagcatattccagtcaatgggaagaaccctgctggagaaatggtatctttaacacataactaaaagagtaaaaaaggattgattagagagacttccagggaatattggcatattgagcagctgcaatgtatgactcatatttgaatcttgactaaaattataaaaattgtaagaaaagttagaaaacgtgaatataactgagtgtttgctttattaatcaaaactttttttgatgtgataatggtattgtggtgttttaacaaagaatttctaacttttagaggtgtttaatgaaatatttacatgtaaaataatatggtgccttgaaaggaggatataaaatgaggtatagatggaataagactgataacaagtaaataattattgaagctggattattgaggtacattatagtattctctttagtgtggaatatgtctgaaatttcctataataaaaattttaaaagccccttaggaacacaaagggacatttaaatgagacgataaggaccaaatgatggactattagacttcaaaaaaagtgttttcatagttcaaagaaaaggaagtccaaataagattttgaaatcctaggtatctagtaaaattatttccaattctgttcaaatattaggtgtccctaacaatctacaataacaggtaagagcaaagttatttcttttaactttggaatgtatttccttcttacagttaaaaaggcttatctgatagattgacaatttccctaaacatttatcaaatcatagctttacaatacgtgtggctgagaatgattcactttagcccttttgggagctggggcatctgagctcctgagctaagacttccagcctctagctgtgtgcagccttgtcttttttatcttaatgaactatacagatattgtcatttctaaatccctgttatgccctaaaaatgcatgggaagcactagactatactataaatctgacttgtgattccctctacttaggaactattctctatgccctacatcattgttcagaaggttagtgtcttttcccaaacagagatacacacttcagatagaagcagatgccaatctgtcaactaacatgtatttattgatttcccagacacagtgggaagggaagatacatacttgatcttaccatctgttctctctaaaaatccctttatttctccactggctttgatattacagagtcactagtgcactcgagagtctacggtcagttaatagacatttaatgagtggataacaaatatctgtctaagtgttggattctagagctcaagaggtaaatatgtaagacatggttcttgctatccttttcttagttctcagtctctttgctctcattgctaactttgacaccaatgaactctaccttgtagaaactttctaattcttaagtttccagatggctccctatgctctctctgctccaagctgattgcatcattctaaaaattcactgattgatgctgcctctgatgaaatataggcatttctatcatcatctctcatttatttaacagtattgatattactactatgttccgggctcagggaacccatccgtccagcaggagacagagactgctaaagactagtaaagtacaagaaagcgcaattaattgagagagttctgaaggacactgtctggtgctagggaggcacttcatagagaatgtgaaaattagccagagtttcaaaggatgacatactgagttgagttgacgttttatttccactgttcctccttcttccatatagctgggattagccatagagcattcacctatttattcattcattgaataaatacttatcaagcaccaactatgtgagagggactctgctaggcagattcagcaggtggatggtcaccaaactggcaaagggactgtatagcagggggcccccaacccccaggctgcagaccagtagtggtctgtggcctgttaggaattgggccacgcagccgcaggtgagctgtggctgagccagcgagcattaccgcctgaactctgcctcctgtcagatcagaggtggcattaggttttcataggagtgcaaaccctcttgttaactgtgcatgcgagggatctaggttgcacactttttatgagaatctaactaatgcctgatgatctgatgtggaacagtttcatcctgaaaccacctccctcccaccaccccgtctgtggaaaaattgtcttccacaaaactggtccctggtgtcaaaaaggttggggaccactgccctatagggaatacagataatctgggtcagtgacagggagtcactaatacaggatcagtccagacagaggaatgggaaatctagtctgattcttggaagatattgtatcctcaggaatttgtgacagttgtataatcagacaattttggaagtgtaggcatgtaatgcagttaaatcattgtccgtttcagatacaatctatcccatttacattagttcacatctcaaatatgttatcttgagcaaagttatccattctgtgtccttgtttccatatttgtaaaatgaaataaaggatagctaccctgtaagttcttgagggatattaaatataatttatatcattcaagaatttttgtcacctgaaagtgctcaataaatgcaattgtttaaagttatgggattttgaactaatattgttgtagcatttcctgaaaggatgaaacagcaaggtatgtgtgtatgtatcagtgtgtgtgtattatagacacaaggtgtacaagacttcacagactgtcacagaaagaattactttgtgaactactgatagtaattaatcatcatgaatttaaatattagttgtcagttctcaatgacaagaatagcattcaggagggttagaattccactctgtttttctgagagggaggctggatggtttgcgtacatttgttagtagctgagtaaaattcaccccttataatctgtgaggtgatctttgtattagtctatttgctttaatttttactgaccagagtgctcgaaaaagctgcacttattacttggctataccatgttttttttttttttttaaatggcacttttgtatcttttagtaggaaagatgaaatttcagtttattttggtttgtaacttgtaacttttttcatcaactaacagaaatcctctcataaggcaattatagcctttagtcattattgccataacttccactgctttcattagagatggtgaaaaatatgagtgtggttgtggaaagggtttgagaactaagacagctcacatatgtcataagattaattttagactagatattttttccattcaatgctcacttactttctccattttttacagtatcttgctaagatttaaaatatccaagagattttcacccagagagtattgtttcccaagagggttagttcttatgcatttatattctccaagctgaataaattgcagagctaggccaagaaatgtgtaaaaggtttgcataacctaaccatgtctccagaaataacatattcattcttagatgttatttttgtctttaaatcatgtctggatgctcacaacagcactattgagcataaagtgtatcatttctccagtctttcattaatcccccctttgcttccttgctaccagccaaaaaacaaaccaggaaacaaacacactaactaaaccaaaattttaaagaataggaaggccaaaaattactttctgcttaacatacatcaaaattattgaggtttttttgaggtctcattgtaaaaatgagataaaaacaaacaaattaatacctttccatctgtgtgcattgatggcactccttaataaaaagtctttgtgactaacaagaaaattagcaaaagagttataatacagtattcgtctttcaaatcaccaagaaccaaagtttttagtgagaagagggttacaaccttttttcccatgtgcattggatcctttaagtaaattatcagcagtacgacaaatatcttattattactatatgggtgtgaccaagcctgttcttgtttaatttagagctaagcaggatagagtatcagagagtatagtaatagatagcaacatgctgtgacttaggtaggtccaggtaatattagtagtaattttaatggtctaaaagctaggtagataagaatgagagtatctgagtcaagagagttagacaccaaattacaagtgccaaaattagaggaagaatcggtaagactgaagtctaagggcagcacttcagccccagggtatgatcaacattggaatcttgggcagaatatttagatccagggacaggggatgatgacagggacctagttaacagaaccggaattcaaggtagagatttgcttctaaggacaagatagatacttggctattagggtgagtcctagagtcagaatccttcaaatgatgatttaatttgatctatttgaagtatgctttaaatctcttcatgactaaggtcagaattgatccaggaccttggagtgctagagcagggcttgcaagtgagagttaagatgtaaacttttcccatttattcttcattccctagtgacacatagttcctttttctctaatctgaactagtctgttagtttaactgttgacttaacttacagcatggattaaagacaggaattctagtattaaacagatgcccttactagctttgggacccaggttagcttattcaacttctcgaagcctctgtttccttatctacaaaatgcaaataagaaaattatttcacagcattattgttagcattgatgtaaaacacttggcataatgcctggcacatagctaattagaatttgtactttatttttatttctaactaactaccagctatgaaaagaagacttcagttgcctgaaaggttgatacttaggcacaagttgacacacaactttccatcgtctgaccatgaattgtgcaggctgctccttctgcctctttcattgtgtctgtctgcctggctgacttgtgtgacagtcccataataattaccaataaaaatcatgtaataatgcttgccaagaagtataatacatgaaattctatctctagatgtctacttaatatattaatcaatttcacctaagctttgaatatgattttcaactcttgaatacaatataatatggagtgctttttttgatggatgtgattcttttgtgaaaacttaagcattgtaccaagaataagatgtgaatgtgtttttttaaagagtaggtgaagctaaaaattgtgctctaatggttactattttggtttcatgcatgattttatggcaaaaacctacataaattgtgtataagttattcaatttcttcctttgggcttatcaaactcacaggtttttccccaaatttatgtgtgcagatatagtcatatttcaggaaatgtgaagttttaaaaattttcttcctgactgctcaccaaattacttagattttttcctgaaatcattctcaggaaagtggtcacatttacgagtgataaaattacatgtgcaatttattgaataattgttaataattaatgacaaataatgaactgcagtcaggagacagattctggcctcaaataatttacagttcttaaaattatgagtagatacttctcggtagggtccatgtttcagttgacactgggctcactctgagaacaggaagtaatcagattacagtgatggtttaacgctatcttacttagaacttagatcaaagagttacagcagctttataatcctcagcactcaatgaatagattgccaaagtaaatctcagtttgtttaatgtctagtgaagcagaggaaaaagcagctattaagcatcacaatttttaaaggaggacagaatgacagtgttaatggatgtggaattttctctgtcctcagtcagcatgcttcattgaatacttatggaatgaaaagtacttggtgcaaactactgtacactaagcgttgtggtgggatataaaaaaggtataataaaggcatttgtgtaggacattgcaggtaaagaaaattctttcacatatatcatctcatgtgatattcacaacttccatgtgaggaaagaatatagaggttatcattttttcccactttactgataaaacgactgaggattttgagattaatgatttattcaatgacctgcagagctagcattggatccacatcttcatatgcaaataaatattcattcattcaaacatattaatctagggactactatgtgccgagtactggtgctatgccaaaacaaaaagcccctgcttttccagagctcatattccacacggggaggtaaaactataacaatttcaagtaaaaaatgctgggctgtggagggatggtgcagatgtaagtaaagcgtactgacaattcagaaaaggaagtccttttactctggcaagaaagatagggatgtctgctagattttgaagttgtgtgtagtgggagttcttcaaagggaagttgggactggctcaagcacaagatagaactcgggaagtaagatgagtaggggcagcaatgaaacgtgacgggaaagaaaggttggggattatgtcccaaagagccagatacatttgtttgaactttctgtggtagggatcactgaatatttttaggtatcagaatgatcaccagaaaataagaccaagatggtagagtgtgatatgtagatataaagtgtgagattggagacaagagccagttttttaaggaccagttggtttaaagcttttatcttctacaattatgttgtacaatgcagttattacaataatcatcacatactttcctcagttacttctttgaaatataaaaaagacatttaaaaatgtttgggaaattaatgaagaatttaataaaaagtaacccttttagttgagtatatggaatgaacaattctctggttaccaagatcattgtctaagaccaacattttatgaaaacgtggaattctacatatatgtgttagggcttgaaatatatttcataaatagaggtagagatttttaaaacaattctgattattttccttatctatagtttgttcaaacacattctttgaaagatttttttcggcttaggattgacttggtgatgcgggctcttttttggttccatatgaactttaaagtagttttttccaattctgtgaagaaagtcattggtagcttgatggggatggcattgaatctgtaaattaccttgggcagtatggccattttcacgatattgattcttcctacccatgagcacggaatgttcttccatttgtttgtatcctcttttatttccttgagcagtggtttgtagttctccttgaagaggtccttcacatcccttgtaagttagattcctaggtattttattctctttgaagcaattgtgaatgggagttcactcatgatttggctctctgtttgtctgttgttggtgtataagaatgcttgtgatttttgtacattgattttgtatcctgagactttgctgaagttgctgatcagcttaaggagattttgggctgagacaatggggttttctagatatacaatcatgtcgtctgcaaacagggagaatttgacttcctcttttcctaattgaataccctttatttctttctcctgcctaattgccctggccagaacttccaacactatgttgaataggagtggtgagagagggcatccctgtcttgtgccagttttcaaagaacaaagctggaggcatcacactacctgacttcaaactctactacaaggctacagtaaccaaaacagcacggtactggtaccaaaacagagatatagatcaatggaacagaacacagccctcagaaataacgccgcatacctacaactatctgatctttgacaaacctgagaaaaacaagcaatggggaaaggattccctatttaataaatggtgctgggaaaactggctagccatatgtagaaagctgaaactggatcccttccttacaccttatacaaaaatcaattcaagatggattaaagatttaaacgttagacctaaaaccataaaaaccctagaagaaaacctaggctaatattaccattcaggacataggcatgggcaaggacttcatgtccaaaacaccaaaagcaatggcaacaaaagccaaaattgacaaatgggatctaattaaaccaaagagcttctgcacagcaaaagaaactaccatcagagtgaacaggcaacctacaaaatgggagaaaattttcgcaacctactcatctgacaaagggctaatatccagaatctacaatgaactcaaacaaatgtacaagaaaaaaacaaacaaccccatcaaaaagtgggcgaaggacatgaacagaaacttctcaaaagaagacatttatgcagccaaaaaacacatgaaaaaatgctcatcatcactagccatcagagaaatgcaaatcaaaaccactatgagataccatctcacaccagttagaatggcaatcattaaaaagtcaggaaacaacaggtgctggagaggatgtggagaagtaggaacacttttacactgttggtgggactgtaaactagttcaaccattgtggaagtcagtgtggcgattcctcagggatctagaactagaaataccatttgacccagccatcccattactgggtatatacccaaatgactataaatcatgctgctataaagacacatgcacacatatgtttattgcggcattattcacaatagcaaagacttggaaccaacccaaatgtccaacaatgatagactggattaagaaaatgtggcacatatacaccatggaatactatgcagccataaaaaatgatgagttcatgtcctttgtagggacctggatgaaattggaaatcatcattctcagtaaactattgcaagaacaaaaaagcaaacaccgcatattctcactcataggtgggaactgaacaatgagatcacatggacacaggaaggggaacatcacactctggggactgtggtggggtggggggaggggggagggatagcattgggaggtatacctaatgttggatgacgagttattgggtgcagcgcaccagcatggtacatgtatacatatgtaactaacctgcacaatgtgcacatgtaccctaaaacttaaagtataattaaaaaaaaaatggggaaaaaaaaagaaagatttttttcttcatattgtactctcatcttcattcaattgctttatttattttcatggatagtcaaagtagttcaaaaattgatataaggttgtgggggcggaagtttttttagaatttaaagaacagtgcagatgaaaggagttttattacatatcctaaatcttaatttttagcctgaatcacttaataattactttataataatcaaattattttatattttctcactactcaccaatagattcacggtatgctttttattataaacatttctgtgtataatttaatgcttgtcaatacttacagaaattcaatgaactgaaatattgtccctaaaaagttgtcagtatctgtttttctggattgtaaagtttataaatatgatagcacacaatggagcaatacttaatattttgtcaaatagttaaaacaaatatatatatacatattacatgtacatacatacatatgtgtatgaagttttatttttagagttaaatttgttaaattagaaacataaaatggaaatattattgtatttagtagtaaatctttttatataggtgtcagtgagtgtttaaattcttcggagttctcattagtaaattatttaaattattggtggccagagttccccaaatatatggtctaacagctgttgattaataaattttcataatttatgacacattgtatgtatatagaattattaataactgttacttataatcatacaatatgaaatatttccgtggttggaaaatatagcctgaaagtgtgtttctgtccattttcaaattagtgtgatcattcataattgctacaaaaaaataaaatatctagaaatacaacttacaagggacgtgaagaaggacctcttcaaggagaactacaaaccactgctcaaggaattaagagaggacacaagcaaatggaaaaagagtccatgctcgtggataggatgaatcaatatcatgaaaatggccatactgcccaaagtaatttatagattgaatgcaatcaccaccatgctaccattgactttcttcacagaactagaaaaaaactgttttaaatttcatatggaaccaaaaaagagcctgtatagccaagacaatactaagcaaaaagaacagctggaggcatcatgctacctaacttcaaactatactacaaggctacagtaaccaaaacagcatggtactggtaccaaaacagacatatagaccaatgggacagaacagaggactcagaaataacaccacacatctaaaaccatctcatctttgacaaactttgacacaaacaagcaatgaggaaatgattctctatttaataaatggtgctgggggccgggtgcagtggctcacgcctgtaatcccagcactttgggaggctgagatgggcggatcatgaggtcaggagattgagaccatcctggctaacacggtgaaactccatctctactaaaaatacaaagaattagctgggcgtggtggcaggcgcctgtagtcccagctacttgggaggctgaggcaggagaatggcatgaccctgggaggcagagtttgcagtgagccaagatcatgccactgtaccccagcctgggcgatagagcaagactctgtctaaaaaataaataaataaataaataaataaataaataaataaatagtgctgggaaaactgactagtcatatgcagaaaatagaaactggacccattccttacaccctatacaaaaattaactcaagatggattaaagacttaaacataaaacctaaaaccataaaaaccctagaagaaaacctaggtaataccattcaggacataggcaagggcaaagatttcatgactaaaacaccaaaagcaattgcgacaaaagccaaaattgacaaatggcatctaattaaactaaagaggttctgcacagcaaaagaaactatcatcagagctaataggcagcctacagaatgggcaaaaatgtttgcaatctattcatctgagaaaggtccaatatccagaatctacaagtaaaataaacaaatttacaagaaaaaaaaaacaacctatcaaaaagtgggcaaaggatatgaacagacatttatcaaaagaagacatttatgcagccaacaaacatgaaaaaagctcattatcattggtcattagataaatgcaaatcaaaaccacagtgagataacatctcatgccagttagaatggtgaccattaaaaagtcaggaaacaacagatgctggagaggatgtggagaaataggaacacttttacattgttggagggagtgtaaattagttcaaccattatggaagacagtgtggcaattcctcaaggatctagaaccagaaatatcatttgacccagcaatcccattactgggtatgtacccaaaggattatatatcattctactataaagacacatgcacacttatgtttattgctgcactatttacaattgcaaatacttggaacccacccaaatgcccatcaatgttagactggataaagaaaatgtggcacatatacgtcatggaatactatgcagccataaaaaaggatgagttcatgtcctttgcagggacgtggatgaagctggaaactatcatcctcagcaaattaactcaggaacagaaaaccaaacactgcatgttctcactcatgagtgagagttgaacaatgagaacacatggacacagggaggggaacatcacacaccagagcctgttggggagtcgggggaaaggggagggagagcattaggacaaatacctaaggcatgtggggcttaaaacctagatgacaggttgataggtgcagcacaccactatggcacatgtatacctatgtaactaacctgcatgttaagcacatgtatccccaaagttaaagtaaaataaaaaaaattataaagacaatatgaaaacttttggaacatacttaaataatgagagtattttttgagtgctatgatgtgccaggtattatctaaagtctttacatagttatcttgatgtctactttatgcaaaattttattcccagtttagaaatgaagaaactgagacacagaaaggtcacaccctggtttcttccctccttttaccctctagactcccactggtgattttattggctgaactcaggagttagctgtcaggggtgcctgagatatgcagtagtcaaaattcttcctcccaggccataaaatacaaacccaaagcagggaagggaaaagagtgggtcccagggaaaacaggcccagaactaacagataactactgtgtagcaggtgcaggtatgtgctattttttttctgatatttataagattttgtatgaaattttacttggtcatttctttgttttaaaaatgttaagctcctgctaagtaattgtgactgaaatatatataaaataaacagaccagtagaagaagagacaagttcataaataaataacatataaaacataattctataaggtaaatatgtataaaatgtattatagaaaaatatgagaagagatttaatttggactggaggaatcagaagtctagaaaagctaagaaaaagaatgtgacgtgagctgggttttgaaagaaataggaaactagaacccagttaggtaggcatttaggcacaggctaaacataaataaaagcatgaaaactacaacgggaattgtatatcaggcacaatgacttgcctgtatagctgtagtacaaggaatatggaagaaagtggaaagataattgttcactgcatgagctcaaagtcatttatacatttgaactgtattcctaaccaaacttaagggctgtttacttcccagatttctgaagattggttgtatccatctttctcttctcattgtttgcacagaccagcatagtgttaatgctgttcttggtctatgtatcattccttcatcatataaggaccttggaattacaaaggaaaaatgcagttggcttgccttccccaaaacatctgtatttgctgcttcccaaaacattaatatgcatcatggttactacaagacttgcaaaggtgatgctgatgtgtctgtgtctggcttgttactgtttgtaccttcatttgctagatttgaagtctggccagggaaataatgtgggcaattgctcaagctatgctgcttcagcttccctttaatacctggtcaagagcagtctccagtgatgctgggtactctgaacacctctgctgcttcatgacgagtaaggactcagaatttagacaagggtgattcataccaggcctgagtaggtggccatcaatgtaatataaatcttttaaagtagaaaagtatttccatgcttatgctggtcatgctgctcactccttcagatccattctctgctgttctctgtgctgtaggaggttgatctctctaggacctcttgttatggtctgaatgtgggtgtccccacatcaacattcacatgctgaaatcctaatcctcaaggtgatggtattaggaggttggcctttgggagatgattaggtgatgaggatgcagcccttatgcatgagattaatgccttcataaaagtgaccccagagggacccctcgccccttctgctatatgaggacatggtgaaaaagcactatttgtgaatgaggacgggatccctcagcagacaccggatctaccagtgctttgatcttggacgtgccagccttcagaacagtgggaaataaatttgtgttgttaataagctacccagtctatggtattttattacagcaacctgagcagacaaagacagtgctcccttgatctttggactgcatttgatttttgcctatgggaagcagtaatagaagaagccagggaaaatgaagagtaattgaggtatttcttacctctctttctccttcctaggccacagtgtttgcagagcctattttcctttaattactgtgagataatgaggcgaccccctcattgctgacttcagcttttgtcagctttcagtagcactgtacctttccttgccctgcaggcctagggatggtaacaactcctcattgtgactagtccttgggtgcttcaccattccttgtcagtttccataaccctgcctgtacctctataaaatgtcccttcattcagtgctcttaaattaaatcctttgagtgcattctttgtttctcttctgcatgctagactacaccatgcagactcctcctttttcaggacagttggatggctcagatctctcaggaatttcccttagtcattttccctcaccaaagtcctgttcactttctgggcagcctgcattcagttactgatcattgtggaggtataaaaggcctggtttgcttggaccctggctggggcagccatggggttcattgtgactgttgttgagactgtggttggcaccaaaacctagcatctccgcctgccagacctgcttcctgtcctcacttccacagatgcagatcctgagagtactccctaataattttctggaatgcttacctcagtttcataatctacttcccagaaagagcaatttacaaacaccatttctttaaaagcacgtgtgctggctgattgttataaagattaattgtcttctcttgtctataattgccaatacgacccacaatgggcatagttttgcttttgtgccttctcagttccctttcctgggatcctttatggtcttatactcttatgctaatctgtactcttaaaaaattatctaaacacactaattaaagcaaccttaagttaccaatttatgcttgctaaatcagcaaacatttaaaaatattatagcctccagtattgttaaagttggtatggcacagatacatttatacagtgctaatggcattataaaccaaaataactcttgagaaagattgcatgacattatatatcattatgctatttgatctaataagtgctttcctgagaatttgttcttcaacaattaaaaggaagagcaaatctacctgtacaagttatcatctgttttgcaagaaaagaccaccactcaatatctgaaataaaatactgaatttattaatattttaagcaagggaaagccttgcttgtgaggctcagcctttctgagcaaagcatgaagctgattttatatgggtttttggcagtgtggagtccagaaatttgaagttcttctgagatgtcactgtttagtgattggctgacccttagttgtaggagcatggttaccagtgtgcatctgttgctgactttaaaaacgcaattactaaactgaagctgtttccaactggctgactttcagaattctgagctgtcactgactaggtttcagaaacatgtttattgaagtgaattgtcattgattgattatgtaaatttaaactcagctgggttgttacttattataatacctagcaaataactagtcttctcacagaagtgtaagaactttttttctcaacagcatattctctaatatgaacctggatataatctcaatgtctaatatgcaaatggttaagtaattatggtgaagacataatggaatattatgcagtcaataaccattattaatgttgcatagctgcatagtaaaagatttataatgtaagggtacatttaaaaaagattttaaatagaattttcttgtttatggcaactatttgaaaaatatgtgtgtgtgtgtgtgtgtgtgtgtgtacagggatcaattcatagaatgatgaataatgcttaatgttttacatgtttttatattttatatgtatatatgtgtgtgaacacaaacatgttttaaaataaagattaaaaaagcaatttaataattcaacagataacaggaaggtttgaattttagtaggagatgttgaagaccaatatgcctttaagacacaaatgaactcatctcattagaggccataaaagtggaagaagcactgaacttggaatttatgtcttcatttgaatctttcctgcatcacattattatttatctgaccttgggcgaaccatttgtcctttgtgagcttcatttgcccacctttaaaatatgactaacaatcatatgcttcataggttaagagaattagatgagactcctgttatgaaaatgctttgtcttggaaatgcgggctcttttttggttccatatgaactttaaagtagttttttccaattctgtgaagaaagtcattggtagcttgatggggatggcattgaatctataaattactttgggcagtatggccattttcacaatattgattcttcctacccatgagcatggaatgttcttccatttgtttgtatcctcttttatttcgctgagcagtggtttatagttctccttgaagaggtccctcacatcccttgtaagttagattcctaggtattttattctctttgaagcaattgtgaatgggagttcactcatgatttggctctctgtttgtctgttattggtgtataagaatgcttgtgatttttgtacattgattttgtatcctgagactttgctgaagttgcttatcaatttaaggagattttgggctgagacaatggggttttctagatatacaatcatgtcatctgcaaacagggagaatttgacttcctcttttcctaattgaataccctttatttctttctcctgcctaattgccctggccagaacttccaacactatgttgaataggagtggtgagagagggcatccctgtcttgtgccagttttcaaagggaatgcttccagtttgtgcccattcagtatgatattggctgtgggtttgtcataaatatctcttattattttgagatacgtcccatcaatacctaatttattgagagttttcagcatgaatggccgttgaattttgtcaaaggccttttctgcatctattgagataatcatgtggtttttgtctttggttctgtttatatgctggattacatttattgatgtgcgtgtgttgaaccagccttgcatcccagggatgaagcccacttgatcatggtggataagctttttgatgtgctgctggatttggtttgccagtattttattgaggatttttgcatcaatgttcatcaaggatattggtctaaaattctcttttttggttgtgtctctgccaggctttggtatcaggatgatgctggcctcataaaatgagttagggaggattccctcgttttctattgattggaatagtttcagaaggaatggtaccagctcctccttgtacctctggtagaatttggctgtgaatccatctggtcttgggctttttttggttggtaggctattaattattgcctcaatttgagagcctgttattggtctattcagggattcaagttcttcctggtttagtcctgggagggtgtatgtgtccaggaatcctaagccaaaagaacaaagctggaggcatcatgctacctgacttcaaactatactacaaggccatggtaaccaaaacagcatggtactggtaccaaaacagacatatagaccaatggaacagaacagagccctcagaaataataccacacatctacaaccatctgatctttgataaacctgacaaaaacaaggaatggggaaaggattccctatttaataaatggtgctgggaaaactggctagccatatgtagaaagctgaaactggatcccttccttacaccttatacaaaaattaattcaagatggattaaagacttgaatgttagacctaaaaccatgaaaaccctagaggaaaacctaggcaataccattcaggacataggcatgggcaaggacttcatgtctaaaacaccaaaagcaatggcaacaaaggccaaagttgacaaatgggatctaattaaactaaggagcttctgcacagcaaaagaaactaccatcagagtgaacaggcaacctacagaatgggagaaaagttttgcaatctactcatctaataaagggctaatatccagaatctacaaataactcaaataaatttacaagaaaaaaacaaacaaccccatcaaaaagtgggcaaaggagatgaacagacacttctcaaaagaggacatttatgcagccaacagacacatgaaaaaatgctcatcatcactggccatcagagaaatgcaaatcaaaaccacaatgaaataccatctcacaccagttagaatggtgatcattaaaaagtcaggaaacaacaggtgctggagaggatgtgaagaaataggaacacttttacactgttggtgggactgtaaactagctcaaccattgtggaagacagtgtggcgattcctcaagtatctagaactagaaataccatttgacccagccatcccattactgggtatatacccaaaggattataaatcatgctgctataaagacacatgcacacgtatgttttttgcagcactattcacaatagtaaagacttggaaccaacccaaatttccatcaatgatagactggattaagaaaatgtggcacatatacaccatggaatactatgaagccataaaaaaggatgagttcacgtcctttgtagggacatgaatgaagccggaaacgatcattctcagcaaactatcacgagaacaaaaaaccaaacaccacatgttctcactcataggttggaattgaacaatgagaacacttggacacagggcggggaacatcacacactggggcctgttgtggggtgggggaagtggggagggaaagcattaggagatatacctaatgtaagtgatgagttaatgggtgcagcacaccaacatggcacatgtatacatatgtaacaaacctgcatgttgtgcacatgtaccctaaaacttaacgtataataataataataataataataataataataataataatagcatcccttgctgtgttaagaattctgtagatctgtgctggctaataagacagccactagccatatgtgactagtgagtacctaaaattcggccagtttgaattgaggtatgtgctctaagttgaagatacattctggatttcagagagttagtatgaaaaaaggaacataaaatatctcatcatttttgaatattaattacattttgaaatgacatttgtatatatttaattaaataaaatctattgttaaaacaaaaaaataaattgctgaatctatccaaaaaaaaagaaaatgctttgtaaactagaaaatattatacaaactattattttttcatctttcaattttctaattgtcataatatttgtatgtatttatggggtacatgtggtattttgttatatgcgctgactctaatgatcaagtcagagtatttggagtgtgtatcaccttgaatatgtattatttctatgtattaggaacatttcaagtactttcttctagctgttctgaaatatacaatacagtgttgttaactatagtcacactattctgctattgaacattagaacttattccttctatctaactctatgcctgtactcataaccaacctctttttatctccctacccatctacttacacacccttctcagcctctggtatctattattctactgtctacctacatgagaccaacttttggttcttacatgagtgagaatatgtgatatttgtctttctgtgcctggtatatttcacttaacataatgacctccatttccatccatgttgctgcaaatgacattatttcatttttatggctcagtagtattctatcatgtacgtataccacattttctcaatccatttgtttatagaagcttaggtggattccatatctttgctattgtgaacaatgcagcgataaacatgtaagtgcagcatcccttttatacacttatttattttccattggagaaatacctagtagtgggattgctaaattatatttttgttgtatttttagttgagaaatcttcatactgtttttcatagtgttttactaatttacattcccaccaacagtgtgtaagagttcacttttcttcacattctcaccagcatctgctattttttttgttttaatagtcgttcaactgggtaagattatatcacattgtggtttcgatgtacatttcccatttttccctccctccctccttccctccctctctccctcctttcctttccttccttccttccttccctccctccctccctttttctttctttctttctttctttctttctttctttctttctttctttctttctttctttcttttctttctttctttccttccttctttctttctttttctttctctctctctctttccctccctccctcccttccttccttcttttctttcattttctttctctctctctttccctccctccctcccttccttccttccttcttttctttctttttctttttcttctgttttttttttttttttttttttttacagggtctcactctttcaccctggctggagtacagtggtgcaatcttggctcactgcagcctctgcctcccagactccagagatcttcccaccttagcctccagagtagccaggactacaggtgcccaccagcatatttggctaatttttgtattttttgaagagatggggttttgccatgttgcccaggctggtctcaaacttctgatctcaagcaatccacctgcctcggcctcccaaaatgctgggattacaggcatgagccaccatgcccagcccagcacttattttcatatacctatttgccatttgtctgtcttcttttgagaaatgtcaatttatgtgcttgcccatttttcaatgagattttttttaacttgtttgagttccttctatatctggatattagtctcttattagatgaatagtttgcaaatagattattccagtcaacagattgtctgttcactaagttgattgttacctttgctgtgaagacacttttaaatttactgtagtctcatttgtctatttttgtttttgttgcccgtgcttttgaggtcttagccataaaatcttttctagacctatgtccagaagtgtttctcctttgttttcttctagcagtttttatagtttcaggtcttatgtataagtctttaatctaccctgagttgatttttgtatttggtgagagttaggggtctagtttcattcttctgcatgtggcgaccaattttcctagcaccatttattgaagagaatgttctttctccaatatatattcttgcttcctttgtcaaaaatcctttggttgaaaatacgtgaatttatttctgggtttgctactttgtcccgtggtgtatgtgtttgtttttatacaaaaaccatgctgttttagttatgacagtcttgtaatatattttgaagtcaggtaatgtggtgcctccagctttgtttcttttgcttaggattgctttggcagttcagactcttctttgttaacacatgaattttaggattgttttttctatttatgtgaaaaaatggcattgctattttgattggaattatattgaatctgcaaattgctttggacagtatggttattttgatgatttattcttttgattcatgagcaggggatgtctttccatttgtttgtgttatcctcaatttctttcgtcagtgttttgtagttttccttgcagagttctttcacttccttggttaaatttattcctaagtatttaattttattttttagctgttacaacttgtgttgccttcttgatttctttctcaactagtttattattaatgtatacaaacaatactgatttttgtatattgatattatatcatgaaactttactgaatttattaatttattagatctcagtttttttgtggagtctatagatttttttctagatattgaattacaccatctgcaaagaagggcaatttgacattctcattttcaatttcattcttttgcctgatggttctggctaggacttccaatactatgttgaataggagcagtgagagtgggcatccttgtcttgttccagcttttagagagaagactttcagctttccccattcagtatgacgttagctgtatctttgtggtatatggccctcattttgttgaggtatgtctcttctatgcctaatttcatgagggtttttatcatgaagggatgttgaattctatcacatgccttttctttgtctagtgacctaatgagatggttttgatccttcattcttttatgatgtatcacatttattgatttgcatatattgaatcatctttgcattcctgggataaatcccacttgatcatggtgtattatctttttgatgtactgttggttccaatttgctagtgttttgttgaggatttatgtttctctgttcctcaagaatattggcctgtagtgttgttgttgttttcatgtttttgtctagccttatagaatgagtaatggagaatttcaaactatattattaaggtatcagattcaatattaatactgtaggtaactcaaagctaattgctaaaaaaataaataaaatgaagttgtaattttttgaaacataaaatgcttcataatatgaagtatgtttggaattgaagccaaggaaaacacatgctgcttctcaaactatttgtcctttaatgaggtgccaaataactcaacatctgtctgagagttggtcatggcataaagggggataacttttctaatatactatgtggctgctgcttcattggggaaccttagaacagatgcactggcaatgtggtctacattgtacctttgctaacaagcttcctttgatttggagtcattgtgttcagtagacatcttaatggaaaagctacaattttgttcctatggaatacatgactattggtataaacagtaaatgtaatacacacttcttcctattgtgaggtgtccactggcttcacagtcctaccaaaggttaaacataccccaaaaccgaatcatgccaaggcaagctcaataattttaaagtccagcttttaaaaacttaagcagctaagtcactaatgaaaaaatatcctatctgtaccactgagatgagaaatttagaactgctagaactgctaatcttataattactaggagaattctgcaatttaaagcttgacaaatttttttttttttcctaactggcaaaatctagcattatctttgcttattttaaagttttaggttgattatttgacttaaatgaaatttaagataatttgccttatattggttttcattttcatggaaagaccatttctattacataccattcatatgtgagggtatgtgtgggtggctgagcacatcaggtttcatgtttattttaaatacagttaaaatctaaactgttctttcccctagaaactggggaattctggagattaatcagtggataaacagactttatagcagatgaatatatcattagtttcagttgagctttgcttactgtggtaacttgaatatccagatgaatttaatcaattaacaactagacattgtgacggattgaagtatacatgttcttaatctcaatgtactttcactctagctttggagacagaataaacaagttaaccaattaaataatacctgtagtcagctgcaatcagagttgtaggagggagagagtcccacgagagtggtggggtttaagctagtgtcaaagaatttggatacatggaggagagcagacaagcaaaagaaagaagagtatgcaggcgtctagaggagacataatatagaatatttacatatgttttgcaagtgaagtctgcagttctatatcctcagtttgaaaacacacacatatacacacacatacacacacagacacaactgcagaatgaacaacaaagggactgagatgaaacagctgctgtggtagttaggggcattggttctggggtgagactgcctggatttatgttccaacctttgtgattcgctctgtgactttgaagaactcacctacctgtactaagcctcagttgtttcataggtgaaatgggaatgactataatagtaccagatgaaaatgggaaaattgaaggagaaaaagtaattagaacaatgtccagtgtgtgattagatgtaagtaaaacttattatcatttgccatttgtggaaatgtgttcataattttgttacctgtggtgtattgctacaggacccttgagaccagaaacttcttttatttttaattaattagttaattcagcaatcagattttgaacattcatttataacaagtgctaaagatgagataagttgtctaatgacaggcatctgctctttgtacattttatatgattaatagttgttgaaataagggaaataattatcagcggttggaagtatatattgtcttaaaggttacttctttctttggtagttcaactagtactttttatagcccttataaagttatggtataattttttatataactatactgtataaatctttaggatctcattggtgtatcatcttgtggatgtctgtcccagtaaagaacttagactatcacatgtagtcaagctcattgttacaaaacatgcgcttcttattttaattacagaagtctaagtttaataaaaatgttgaatagattcaattcaatgtaatgaatgttagttatttcatttgtttgatatttcagtgctttaatggatttaatactaaaatgcttttttatttaatgaaaagcatggcagaattttattgcagtgcaaggtgcactgtactaatagtacttgacatctatataaattgttgtgttggattgaatgattagtattaaaaagaacataatatttttacttctcattgtgaaaaataaaatcagtcttttagaggtcaaataattattctagaagtcattaatagaattggatactgcccgagatgatccatgatgtcaggcccatgtgatctgataatctcctttatacttgttcttttctgaaataaagctgatctattaatctcatgtgtttttaatttaaattcatcaacttctgccttgatgtaagagaaaatcttataataggatttccccaaattttgattccttgcttttagaaacctagcaaagccatagattacagaattctagagctggaagagaagatattccctttattttataatcctctaattttactggtgaggaaactgaggcctgctgagttatcatacttgcttaagacaatagtcacaaaaccagactgaagctaatgttttctgtttccaggtatctatctacaaaccagagactcataatattgatagtaactaatttaagagcacacaacttaaatattttgacagggcttaccacaaatgagtcactattttaattgagtgaccttgtttaaatagatcaggatcttgttttactgttaaagggaatcaccaagcaaaacatgcctcaaaacctatttatgccttatagtcttgaaagtcatgatgtcttcagctccctaatatcagaacagtattttctaaaaagaaaattgtgaataacccttcacttagcttctctccacttaaaagcgtgtctgcatctgtacccaccctaaccccagtccctgcttctccctagggataattgtctacctgtgctataggtctctcttcttccacttcatcagttatccttttaccatcaaccactccctgtacatcagctctttcttctaaaaaatagacttattcaagtaatctcctacccacccgcccccaataaacaataaccttttattcatcttctgttgcatttcttctttgggcattactcccttctctttttttctacagagataaattccattaataaattatctacatttgctacttccattttattagctcaaattcactactcagacagtattttcacaaattttcataaattaaaaaagtacctattgaaaataaataaataaataaacattaccatgaaagtaaagcttgaaaataaaattcaatagaataattttttattgtaccccctaaaggaggaagaaatgaattgatgggtggtgattgtgaaagagaagtatctaggaggcattctttggaaggagtattctttctgcattgttttttccccaccagtctttggacattttagggactcatggttattgtctacttaaattgctcacaaagataaactcattagtggacttatttttaattaaaaatgaacatttcctaaatttatattaaaatgcaaagatctttgacttgctgaacagtttttaataagaaaaaacagagttggtgagcaaagcacatgagtagatatttctcaaaagaagactgacttacaaacagccaacaaacatgaaaaaatgctcaacatcactaatcatcagcgaaatgcaaattaaacccacaatgagatacgttactcctgcaagaagtacactttactctttactcctgcaagaatcgccataattaaaaaagaaagagatgttggcatggatgtggtgaaagggaatacttttatactgctcgtgggaatgtaaattagtgcaaccaccatggaagacagtatggagattccttaaagaactaaaaataaaactaccattcaatccagcagtcccactactggatatcaatctacccaaaggaaaagtaatcattatatgaaacatgcacacatgtttataacaggacaattttcagttgcaaagatatggaatcaacctaagtacccactgaacagtgactgtttaaagaaattgtggtatatatatgtataccatggaagactacccatccataagagggaatgaaataatgtgttttgcagcaacttggatggatctggaggccattattctaagtgaagtgactcaggaatggaagaccaaatatcgtatgttctcacttataagtgggagctaagctatgaggacacaaaggcataagagtgatataatggactttgggtacttgcaggggaagtttgggaggggggtaccagataaaagactacatattgggcacagtgtacactgcttgggtgatgggcgcactaaaatctcagaaatcaccactaaagaacttatccatgtaaccaaaaactacctgtaccccaaacaactgttgaaataaaaaaaaagaaaaaaacagagttagaggatttacactaagtgattttaagacaatattctattggcataaggatagacactaagatagagagtccagaaataattccatgcctataccagcaagtaattttctaagtaacttaaagaggaaaaaggtagtattttcaacaattaatgttggatgttatatgggaaaattaatttgtataataactcatgctatataaaaaaattaactcaaaatgaacatatacatatgaaacttaaatatataacttctagaaggaaatataggaacataatctatgaaatgatgggttgatcaaagatttcttagaacacaaaatgtcagaccatataaaattaataaattggaaaattctaaacctaaaaactttgctgtttaaaagacattgtgcagaaaataaaacgacatgtctcagccttgaaggaaatgtttacaaagcatatatcttgtaaataatttgttttcaaaacatgtaagcaactcttacaaaccagtagggagaaaaatcaccaaataaaattatgggggaaaagtcgaacatcatttcacaaaagaaaatatatgaatggaagataaacacatgaaaagatgctcaacattgttagttcttagggaaatgtaaatcaaaagcatagtgagatactactatactcccactagagtgggtaaaatgaacaaaaacaggaacaaaaaacctggtaatagtaagttttggcaaacgtgcaaagtgtctggaagtctcatacactgctgctgggaatgcaaagtagtttagccatgttgataattaacttggtagtttcttttaaagttgaatatacatttaccaaatgactcagaaatcgcagtcttagctacttacccaagacaaattaaaacatatgtctttaaaaatattgtactgtacttgaatgttcattgcaactttataaggtgtgaggggatggaatttatcacaaagaggcaaaatgatggaaaaattctgtgtcttagttttaacaatgttagagaactgtatacattactcagcttaaagtaggtgagtttcaataccatttttacttcaggtatgctgagaaaatgatacttcaggctgggtgcggtggctcacacctgtaataccagcactttggggggccgaaacaggtgaatcacctgaggtcaggagttcaagatcagcttggccaacatggtgaaaccccatctctactgaaaatatgaaaattagctgtgcatggtggcaggcacctgtaatctcagctactcaggaggctgaggcaggagaatcgcttgaacccgggttgcagaggttgcagtgagctgagatcacgccgctgcactctagcctgtgtgacagagtgagacactgtctcaaaaaaaaaaaaaaaaaaaaaagacacttcaaccacaggataaatatggggtctacatgaacattgaccgtgtttctcaccacacataaacattaattttatgttctgtcaaatagtaaaaatatactatttaccttctttaaataagtggatgaatgtcttgtaaaaattaggatggagatcattgcctaatttcccattaggcattaaaaatcatgaccagataataatgaaacaggagaagttacagatataaatcctggagaataaaggcaattttctctctattcagtattacttaacacagtattagatttaacatggtttacaaatgataataatgacagttgttttattgtcatctgggcaaagatgaaaaagaaaataataataataataataataataataataataatacttcaaattatttatagtaattccctaagaagtgaataggaagattttctgtaacctttgcattctatatttgaaggatgttggtatttgttttaaaaaatgatctacattccattttttatatatgcatgtgtgtgtgtgtatgtgttactagtctgttctcgcactgctaataaagacatacctgagactggataatttaaaaaagaaagaggtttaattggctcacagtttcacatggatggggagacctcacaatcatgatggaatgcaaatgaggagcaaagtcatgtcttacatggcagcaggcaagagagcttgtgtaagggaactcccctttataaagctatcagatctcatgagactaattcactatcactagaatagtgtgggaaagacccacccccatgactcaattgcctcccactgtgtccctcccatgacatatgggaattatggagctacagttcaacatgagatttgggtgaggacatggccaaaccatatcagtgtgtatatacacacacagtctgtgtaatgacagtctgagaaacagaagtaagcccaaaatctttctgtgatccaggcaatgttatttagctttatgataaaagagagaaatagttattggttcctattcaccaacactgagggagagtattatagactacatttgtggctggatagtaatttgtcagtatttgttgtttgctataatcattcatgattatatatagtctgaaagacttgggataaatgccatttaagaaattatattatttcttcatcttatgattcgtccttttgtggtgattgtaatgtttaccttgttagattcatcttgacctcctgtctggatccctggagactgtgaagcagttgttatattcttttgtaataagaaaatttaggcataaatagctcaaaagcagagttatgtaaggtattgttatttctattgtgttttttaaaaggaagtgaggttgaaagagggcattttgtggtgaaatgaagagcatgagacttaactgaaatggtgggattgtgattcagcaaagtatttaataaggacctactcacatgcaagactttgccaggcatcactcactgtttcatttaatcctcaaaataaccctgtcagatatataggatgcattatttctattttaataaataagaacacagtttcagaagcgtcaaataaattgctgaatgttccacagttactatggacagaattagaatttcaacccagagtttgtctgaatccaattgcagagaccttacctgtacacagatatataatgcattggcttgcatagaataaagtttatattggagaatcttcaaatgcctatcatcaatcctagaaatattaatgctcctgtcttcctaaaggcatgcaatacaatttcaacttttcttttagatttaggggtacatgtgcaggcttgttacttgggtaatactgaggtttggagtatgaatggttccatctctcaggcaataggtagtttttcagcccttgacccctttcttcttttctctctctagtattccccagtgtgtatttttcccaatgcttagctcccacttgtaagtgagagcgtgtgtatttggttttctattcttgtgttaatctgcttaggataatggcctccagctgcacccaagttgttgcaaaggacatgattttgttcttttttatgactgcatagtattccatgctgtacatataccacattttctttatccaatctaccattgatgggcacacaggttgatttcatagctttggtattgtgattaatgctatgattaaaatatgagtgcatgtgactttttgggagaatgatttattttcctttgggtatatgcccagtgatggaattgctgggtcaaaaggtagttctgttttaagttctttgagaaatgtccaaactgctttccacagtggctgaactaatttacattcccaccaacagtgtatataagccttcccttttctctacaatcttgcaatcatctgttactttttgacttttaagtaatagctattctggctggtgtgagatagtatctcattgtgattttgatttgcacatctctgatgattagtgatgttgagcatttattcatatgccttttggccacttatatgtcttttttgagaagtgtctcttcatgtcctttgcccatttttaatggggtcgttttttgcttgttgaattgtttgtttctaaagattctggatattatacctttgtcagtgcatactttgcaaatattttcttccattttgtggggtttctgtttactctgttgataggtttcttttctctgtgcagtatttctttagtttgattaggtcacacttgtcaaattttggttttattgcagttgtttttgaggacttagtcataaattctttgccaatgctaatgtcaagaagggtatttccccaccatcattcttcacagcattggaaaaaacaatcctaaaaatcatatggaaccaaaaaagaggctgcatagccaaagcaagactaagcaaaaataacaaatctggaggcaccacattacctgatttcaaactatactataaggccatagtcaccaaaacatcatggtactcgtataaaaataggcacacaggccaatggaacagaatagagaacccagaaataaaccaaaatacttacagacaactgatctctgacaaagcaaacaaaaacataaagtggagaaaggacacccttttcaacaaagggtgctgggataattggctagccaaatgtaggagaatgaaactggaacctcatctctcaccttatacaaaaatcaactcaagatggattaaggacttaaacctaagacctaaaactataaaaattctagaagataacattgtaaaaacccttctagacattggcttaggcaaggattttatgaccaagaactcaaaagcaaatgcaataaaaacaaagataaatagctggaacttaattaaactaaagagttttgcatggcaaaaggaacagtcagcagagtaaacagaaaacctgcagagtgggagaaaatcctcacaatctatacatctgtcagaagaataatatccagaatctacaacaaactcaaacaaatcagcaagaaaaaaacaaaaaaatcccatcaaaaagtgggctaaggacatgaagagacagttctcaaaagaatatgtacaattggccaacaaacatgtgaaaaaatgctcaacatcactattgatcaggaaaatgcaaattaaaaccacaatgtgataccacttcactcctacaagaatggccataataaaaaaaataaaaaataaatggtagatgttggtgttgatgcagtgaacggagaacacttctacactgctggtgggaatgtaaactagtgcaaccactatggaaaacagtgtggagattccttaaagaactaaaagtagaactactatttgctccagcaatcccactactgggtatctatccagaggaaaataagtcattatacaaaaaagatacttgcacatgcatgtttatagctgcacaattcgcaattgcaaaaacgtggaaccaacctcaatgcccatcaatcaactagtggataaagaaacgttacatatgtatatatatatatgtaatttatatatataatatatattatatatattccattttatatatatatataatggaatagtactcagccataaaaaggaatgaattaatggcatttgcagtgacctggacgacattggagacattattctaagtgaagtaactcaggaatggaaaaccaaacatcatacgttctcactcataagcgggagctaagctatgaggatgcaaaggcataagaatgacacaatggatttggggactcagggacaaagggtgggaagggggtgagggataaaagactacaaatagggtgcagtgtatgcagcttgatttatgggtgcaccaaaatctcacaaatcaccactaaagaacttacccatgtaaccaaacaccacctgttcccccaataacgtatggaaataaaaaaataaaaaagaagggtatttcctagattttcttctaggatttttatagtttgaggtttaatatttaaatatttaatcaaccttgagaaaatttttgtatgtgatgaaatgtaggggtccagtttcattcttcttcctatgggtagccagttacgccagcaccacttattgaatagggagtcctttaccattgcttatttttgttgactttgttgaagattagatggttgtagatgtgtggctttatttctggtttctctattctgttccattggtatatgtgtctgtttttgtttgggtaccatgttgttttagttactatagccttatagtatagtttgaagtcaggagctatgatacctccagctttgttcttgtttgggattgctttcactatctgggctctttttttaatttcacacgaattttagaatagttttattctaattctgtgaaaaatgatgttagtttgacaggaatagcactgaatttatagattgctttgggcattatgggcattttaatgatagtggtttctcaaatctatgagcatggaatgtttctccatttgtttgtgtcatctgtgatttctttcagcaatgttttagagttttccttctaaagatatttcacctccttggttaggtgtattcctaggtatgttacatttttgcatgactattgtgaatgagattacattcttgatttggctctcagattgaatgttattggtgtatagaaatgctactaatttttgtacactgatcttgtatcctgaaactttactgaagtcatttatgagttctaggaaccttttagtggagtccttagggttttctctgtatatactcatattgtcagcgaagatagacaatttgactttttttcctatttggataacttttatttctttcttttgcctgattgctctggctaggacttccagtacaatgttgaataagagtagtgagagtgggaatccttgtcttgcttctgttcttaaggggagtgcttccagcttttgcccattcagtatgctgttggctgtgggtttttcatacatggctcttattattttgagggtatgtttctttgatgcctaatatgttgagagttttttcatgaagggatgttggattttatttaaagctttttctgcatcattgaaatgattatatggtttttgttttcaattctgtttatgtgatgaatcacatttattgatttgcatattatgaattaaccttgcatcccaggaataaagcctactggatcatgatgaattaactttctgatgtgcttctgaattcagtttgctatattttgttgaagatttttgcatatatgttaattaggcatatttctgtagttttattgttgtgcctttgccagattttggtatcagggttatgttggcttcatagaatgaattagggagaagtgctcttcttgtacatttggtaaaatttgtctgtgagtccatctggcccagggctttttttgattggtaagttgttttattattactgattcaatttcaaaacttgatattggtctattcagagtttcaatttatttctgattcaattttgaatttgatattggtctgtttgaagtttcaatttctttctgattcaatcttgagaggttgtgtgtttctttgttaatttagctagtgttctattcatcttgtttatcttttcaaagaaacaatttttggtttctttggatggatttatgagtctcagtttcatttagttctgctctgatttgagttatgttttttcttctgatggctttgggattagtatgttcttatttttctagtccctctaggtgtcatcttagatcattgatttgagatctttttaacttcttggtttaggtgtttagcactataaacttttaacattgcttctgctgcatcccagagattttgtatgtgtctctattttcatttatttcaagaaatttttttacttctgccttaattttttttatttacccaaaagttattcaggagcaagttgtttaatttccatgtcattgtgtggttttgagagatcttcatggtattgacttttatttttattccaatgtggactgagagtatggtgggtatgatcttgattttcttgaacttattgagacttaatttatggatgagtctgtggttgatcttagagtagcatgcaatgttttaacactttcttatattgattatgtgttattgaagccatatcagaaatgtatgcaacaaataattgttttgccaatagaaatggaagattagaaggatcaaatgacttgttaatgatttcatagtcactaattgagctcttattggtagctaagtatcagtgataagaagttttgtttatgaatcaactactttccttcatcttcctgataaaattccacttaccttacaaaagcacagttcagatttactttcttgatgaagccttccctggtcctcctaggcagacttacataactttcctctaagttattgtcacaccttgtaaagcatctctgtcatataactgattgtatcagttgtgcattacgattgtgatgatactctacttagattcaacagtccttgaggacagaagtcatactgtttcatctatgattcctcaatgcctatacagtacacagccctcagtaatgctcaataaattgttgttggatacatgaatgaataaatgcccaagtacatgactatatgaattcataaataagattttggtgggtgcagaagtatattttttggttttagaatgctttccaatatataaataagcttttgctgaaacaaaaccaaaactaaacaaaacaaccctttaatttagagtctgcagatataggcactgtagtggaacaaactgtggaccaaaagccaagttatgcaaccaactaggtgaatgacaggtcagcttttatggatctctatattttatctgtaaaataagggaatcatggtatggcaaacattacaaaggtggtattttaataagtaaaagttgaaaatcactgctctaagacattttatggaagtgggtataataagcactactgtagtggttttcaagcttttctttttaagtggcagaacttcttgtcaagtaaaatcttacacagagttccagaatgtaaaatagttaaaaattagatgttgtagctgctaagtctctttgtcctctaatatttgttccttctggcctctcatttcctgcatatcaaatgtattaggtgcttgtcaaatttcatggatgagtccattcttagggcaaagcttaatttctcatctttaaaaataaatatagcctgggcaatatggcgaaacccatctctacaaaatatgcacacacacatgcacacacacacacacacacacacactagccaggtgtgggagtgtgcatctgtagtccctgctcatttgagaggctgatgtcggagaatctgttgagcccacgaggttgaggctgcagtgagccatggtcgtgcctgggcaatagagcaagagcctgtctcaaaataatttttaaaaaatttaaaaaaacaaaaataaataaggaaatgatagtttctaaatatgaagacacttaaagaccaataaaaatgtatttctatgttcctttatgttctatcaaaacaatattatgtggcattctagtattaccacatgagtttcagccttctgcttttgaaattgtttctgtttacatgcttatttttcgtatgtccacatagacctgaatcccctgacattttaatagagctgggacagacaggcccaaattggatgttgcttctaggtagggaatcactggcagacttcatatccaattatatttcagttaagccagtaaatattaggccattaattcatttgaagtcctggaaagatttctcacatttttgttatcttcctcttatgaagtctgtaatgatgtagtatttatatttctgagaaaggaatgcacagaaattttgtgtgcttgcttgcttaaaacaagaatgaactattgccctttgttgtttcagtggtcttcccaagaaaggaaaaaaagttacttgatgaagagtgtctggggtctttgagtctacatagaagacttacaccaaattactgtctgtgtcccatataccccatgaaacatgtttgaacagcactgtacaggtggacaattttttgaagtctagagacatagcacttgtgaatgaatgtcatgagtcttctgtattaacttaaaaaaaatttagtattggatcaaagtctaatttagaagaaaaaatacttggtgaattcttgttgaaacataagataaaacagagacaaattattatgctttttaagttatgttttagatatacagttttatacacacaatttacgttttccaatttaatgtaaattcctatgagattacatgaaagagtagctgttcataggctccatatgttctgccaactgcatatctctcctttatgtttcatcattaaaaaaatcttctgattcctttcttgttctgaaatactacttttattcccaattatcctgtttcttggccctgacccatcctatttgctgcttgttctctgataaacaatgcttatttgctgcttccaagtggcagcagacgtaatggttaatttcatgagctctgcaggcatagtgcctgggtgtgaatcctgtctctctgccttttcctagattagtgagcttagatgagtcattcaccctttctgggcctcagaattctcccctgcaaaatggagataaaaatagttgtgagaattacatgagatgatagatttagggactatagaatagtgcctgccataaagttattcatatctctgtcagaagagtaggaatatgtatcctgtcaatatagctgacatttgcagtttaccaggcattctgattctatttcctgccccctcctatctgctgcttttggattatcacactttcagggaatctagcaagaggcctcaagcctatctagtctactcattcaaacattttccagcaaatatttattgcttggcacaagagatatagtggttggcagtattctctatgagcttctgggaggcataaacctattcattcatacaaacaaatatgtaattgtgaaaaatactgtgaatagaaaaataatgtgataataccttcttacaggtaggggaagtccataaaggcttttctgaacaaatgacatcaaagctgaaggctgaagaatgggttagcccggcaaagttgaagacatgttatagtgtaggaaaagtttggagacaagaagggcatgctggatacactctacatccagtcgaactaaagctaaatgagttacaggggagagtgatgtggcataagcataaggtggggaagcaagtggaagcaaaaataggaagttgaggtttaaaagtcaagcagggaccagatctgtagggacttgtatgattaatcttcatattaagggttttgctttatcctaaaaattacagaaagcatgaagaatgcaaagctggggattaatataaggaattttgcatttttaaaagatcacactggagaatagagagagggggagtggaagggcttctctctttgtttcttagttacaatacctggaaaaggacagtagcctcctcaatgaagctttccttgataacattttgcccatagaggtggcttcactcattttttcacctaatgaacccatgatctgttgcacttctcacactgcactgtgaacctgacccaggccaaggtgttcagtattgtaggatgaataagcgttgattctcctctcctaagatgagacaggggcattttaaggccaaggactatgtatattcgtctttgtattatccacggcatctagcaagtccctaccacatgttgggctctcaatcttttgttgatgttgttgttgagaaatcagatgaaaagaagtggtttttcatgatggatggaaatgggggttttggatcatggatgcaatttaattttttatactctcattgaaagttggtaatattaattgaaatcctagagtggctgtttgataaatacctttgagggtagcattagaagatctaaatttgagcatgagcagatgcccagcaaatattaaatgaattgaatgtgtttcagccatacttgcctattacatctgtttgtagatcttctgtggtttattttaggagacggaaaaaattctctaatccatcctaaacctccactaatgccatcttcactttggcacagtgataactcagagatgaaaactctcaggtgtggagagagcttgcaataccaggttattaatagatttgaatacagggatttttttgttcttttccttttgtttaagatgaaacaaaaaatggctgaaatgaaagtgatttatatgcctctttatggtattttaaaccataagagattaatcagtgattacttttttttagactaggaaaaataattcaactctttaaaacttacccacttagtatatactgcagggaaattcactaacaaattcattgaggcattatttacacaagcagaaacatggggttagtttgtcactttctctctgttgtgttattgttgaacattagcattcagctcagcaaattgaatattaagaattctttctttttttgtcaccatgtgtattgatttcaaatgcatgccctattagtaatttacaaagaatgtattttatagtagaaattggtttaagtggttgttcaggagacatgttttactcaaagcagcatttagcctggctactttgccttttgatgattatttaaaaggatgccattatgtctttgttacttattgttctctcaggataagctaatggtttaagttcatattaatccctagcacttttcagtttttatctcaaaagtcattgatacttattacttaattgaaaaaactgattcttctctccaagcaatgtttgtgtctaaatattgagcaactttacaaataaaatgacctttcttattacatatacttttttcccctcaaatttacttgctctttattttttgcatcatacaacttcaaaaattttggggaggaagcacatttgcctctgtttatctccatcatattaaaataagaaagcagcaataactgagtgcagtagtcctgaatttctgaaagtgtgaagagagcagtagatgcaaattaagggggaaagtctaatattttatgtatcaaattctgatatgtttatctaattgttgagtctttagagttgttttttatagtttgtgtttatttctgctagttttctggaatttcattagtttcataaagtttacggatgattatactccaatccctttatttgacaattgaggaaaccgaagtcccagagctaagtggataactagagctaggtggatgtcggggctgggagtggagacagcagttcaggctctgctttatccggcatgtcttccttcagttcatagtacagtacatgctagcacaaaccagaaaaccttctttttcttgaactaaaccttgatgttagttttaaaagtcaagatcccatggtctagttttgaggttcttagacgtttatactttatgaattgataaaatttccaaagaattaggagacttacgtagaattgccaatttttagttttctcagttcagaacattaagaaacaaagcaaaaatacaccaatgcctcattatattattgtcatttcataaatggacattttctcatctaaaaggagatgagtaggacttttcctgttaagctagaaagggcaactgtaacccaaaacagtgaactaaaagccatcaaactatttcacgttctgtaaggatagacatacacaagggtggtctcgtacctcgctctgaggcagaggcagccagatgggttctgattctaatcctcatcctggcaacctctgaactctcatatacatagactctaggtggggagaggaggtgttggagaagtgcgttattggcctactgaaaatgaagaaccatttctagagacaagtgccttcaacaaaggacaggttaacttctgtatcccttaggctccagttaggaaaacaaaaggatttaatacaagcaatttgtcaattctcctggaagaataaagagggtctcctctctccaagtctcttctagtctcctaccagtgatttccattgtcagcacctaaaggaagccacctagaaagagaatctgttaaatatagtttgcgatgtagtctgcaatgtagtttgattcacatagcagaatttagaatgattggcttggggctgaaagacattggtaaataactgacagtatctcttctctccattgatcacttatggagaaggattttgtgcttttttgagaaggagaaagagaagtggagagatatagcaaggaacagagaagaaatagcagcaaagcagcctatacatttaggtgtatctatacatttagtatacatacatttagtgatatatatatttagtgtgacaaggatgcttgagcttattctggatcaagtggacattgcagcttgagccatcatgtcattattccaatcaagagagtagactatcgggcaaggggaccttaccaacaggagtttcaatgtgtgccagtgggggtggaactgaagttacttctccccagtgtgaaagctcctactgccccgttacaggaagggcctcatctcaacaccttccttagagaaggcgtcaaagtaagtctgattttaccagagaagcagagacactcaaaaaggactgcaattaaatgcttagttaagtaagaagacttttccctcttgtcattagttcttctactctgccacaatatagaaagagttagaacctgaagataaaaatagagaggaagaataaaagagtagtacattctttcttcccactccaagtcccagacactggccactgaattaaaacagttatacgatgggagttatggaagcaatctgaactgttgttaaggaggagagaatagatttgatattgcatatggaaaacagttattggagaaaaatgaagactagttcatatctgtgctctactgagttcagaatgttcaataaatcagttacataagaaatagaatgaaagctttttgaacatcatctgcaaaataaaagatattttttaaattggaaaaaaagtagtatttttaaactcaaaatattacttttgtttttctcatttctgcatggttttgtctagcatgtgtccatgatatagaattttaaaataattatcactattcactgaaattccttttagccaggtatcactagtactgataactctaacctgtgaaaggtgaaattcacacattaacacagaagtcagggtccttttcctcattttagcctttaaatatctgtggagaaaggggaaagaggaaaaggtgcaattatataaagaatattctagtgtgaataaaacagaacgttatgaaggactaatataaatttaaaagcatcttttaagtggtgaaatataaaaccacagggaaaactattaaacatatatcagaaatggaatctgtcatcacatttgtcaccttggaaatttttagaaagactttgttttaatgaagcatatggtgttttgcttattcagaagcaaattttataagggacagtaatctcagattaagagaacctgatctgtcctctcacttacaacatttgccttaaatatgaggcatttaaaaactttagtatcttttaatatcactcctttttgtccttacgctagtagggagcatggctccaggaaactgatcaccttaacttgtattaccaatatcagaaaaaaaagatataaagaccatttcacctagtttcaccttgaaaagatgtaaataagacccaatcagtggtacagtgataggttaatagtcttggttttagaacaagaatgttctggtcttaaccagtagagtgcatgcctttgggcaggcttcattactgttcccaagaaatgattccctcacttgtcttgataattgtgcctagctcatttggttggttgcttttatgacataattgaaatcatgtacgtagagtgcttaaaaatggctgaaggtaaatcctccatctctgttagcctaaacaaaaggcagcagaggttcctgaaaagaatctccattgtcatctgtgagtgaggacacaaaactatttttgccttacaaaaacaaattgagataatgcttgccgaccttttctcaaagtatcaaaaccaatctagatctccaagtaggttctactcatttattctttcaatacttatttattgagacttgcttgtgtcagtcactgtgctaggaactgaggggagatatttaacaattaccttctgactattgtaaagttttggaagcaagtctgtattagtcaggatcctagtaggaaatagattgttctcttaaagaagctgaaagagagtttaatggaggtactatttacaaagggtatgggcagggttgaggataaacaaaaagggctatgaaataccaggaggctagcaacaatgggaagctgcttccggttctacagctaaatagggaggcctgcaggatctgtgacctcaagtagaacgttttagccatggctacactatggccagcagagagggtcccctctttcctcctgccttctgatcttttgcaactgcctccattggctgaacatacccaggagccagagggctagacagtacctgagaaccagcctcccagggcacagaccagaatggagaagggccaagagtgggtctgaaggggcagatgaggaatatccagaaaacaatcaatctatatttcttgctttttttttgtcttatataacatatattgacttttttccctaaatataaaataatgtatttttattgtagaacatttggaaaactgccttgtaatttgtgatcctgctttttccgagtcaggacatgtgtccgattgaaggcacatgaatttatatagtaagttatcatactcaaaggatcataaaacaaatttatttccatggctaagaccttacaaaaatactcttgcttgtaaaaagacctactgatgttaccctggaccattttgtctctctgcctgttgtaagcttcctcatcatggcatctttctacatgtattgcactcttggcattcctttttatatttttgaacatcatattgttctacattttctccactaaagaaattcaactcacttagaaaaccttctataacccttattccattattatcattcttccattatcatcatttcacatagcatctttaatattttttatatgctcacaactttacagttataatcattgagtatgtatagttttatatcctgcgtttaaaacacatttaaatcttgcttttcttaaatttaggagtctgaactttttttttttcaggtttaaccctaactatagaggccctcaatattgactataaccctgataaaatatctcttgttgcttgtctacttttgctgggtttcaagcagcctttgagtaaaagtattaaaattctgcctgctgctgtttggtcagcattagaggggcatcgtagttctaatcattctttggtgtatgccgaggaaattcttgtcctttgcatattgaatcaaatacctgaaaagcccatggggttctctccctagagcacttataaaggcaaagtttctcccttcccccattctcttatctactttgtcagtttcactgccaactcctgcataatgtagtcaaattatgtgttagaaattcaaccctggtttcctgggtgatggtacaatgccactgcttagtattcctagtcacatagctacaatttcatcatgctgttaatctatatatatcttcatgctagagaagcagacttttttttaaataaggcatgcattaagggttaaatggacacagtgaaaaaaatatgtaggagtccttgagctcagcaacaatacaggatatttttggtactaagaccttgtgaaaccattatatggactaatacttcttggattttgtattttttatagtacatcttttttcagttaaattctgcaaacaccgaattctttgtattgtcttgtagtctgttgtatgacaactttatattttaaaaattttattttagacttagtgggtacatgtgcaggtttgttacatggatatattgagtaacgctgagatttgggcttccagtgaacccatcaacccaaatagtgaagacagtgcccaatagatactatttcaccttttacccccctcccactctcttccctttgagtcttcataaaccagtaactgctttgcctttggtttccacaatcagagtgcacccttaaattctggtagtgttatagaggttctttgtttctgcaatgacttccagtgatctacacaaagccaatgtcatgaactacagcatctctatctcaaaatagctagatttgtgtgacttaaaccaggaaattcaagctctaactaccggttgctagaattttctgtgataagtaattgcctactagtttatgcaatagacatatgagagatttaaactggtggtaaaaattaagattaaggtttttttctttcatgtatatatattctgtattggtttacttttcttcactttttttttgacagtataaagcagtcatattctttaaattctgaactcgtcatattttagctgtgttaccttggccaaataatttgttctctctgttcctttgtagaaaaagtgatgaaaataatctaacaaactgttgcaagcatcaaataaaatattttatgggaatatactttgtaaactataaaacatttgtgtaaaatgcatgttatttttagattcttcatgatcattatttgggagcctaattgttactcattattcttactatcttttcccaaatagctttgtaccaatttcttggatttttgtattaatattttgtgaagctcttttctcagcatatcaaacttaattggcttgggaaattatgatgtttgcttttacatgtacattgtacatatttcaaatgttaatttagagagtatgccacatatttttctttaaggatacagagctgttcttttttgtgtgtttttttctcctgtaggtattaaaaagtgtcagcaaactgcattgaataacagacatcctaagaggggatattttccacctctataatgaagaaaagcaggagtgtgatgacggtgatggctgatgatgtaagtttcaaaaggtcccaatcatgtttggtctgttcaataaagaagtcactggataattctattcaaagggcagctgggggcatttaacacaccactctgtgactaggtgtttctatgacatgggcacagccagcacctggacctgacgttctgtgagttggacagcaggaacaatgccctctttgcatcttggaaatgggctgagtttcacttttatggttttcaatcacagaaccaccaatctctagtctatgcccagatcctcactctcagataattcctctttccacactgcttgcattatcatcagttctctgataactttcttccacacttttacccatgtacagctaacccttgaaagtcacttcctgtggtggggtttttgacaactactcctaagaagcttgtgatacacacatcccctaggcctttgctactgaagtgtagtccttggactagcagtattagcattacctgggtgtttattgagaatgcagaatctcaggccacacctcagacctacaaatcagactatattttaatgggatagcagagtaaataggtatgtactttgtttgaaagccccgatctaaatcatctgaagaaatctgtaaactatcttctatagctttggatcttggtccttaattatctctttgctttcaattgaccaatccttcattagtgtgtctttaattgtctcatctttacccaattactgtttgtaattgaactaaaaattatgtgccgctgatcagatatgtgaaaggaaagaagggagggaagaagaaaaaacaattttccttgttttctgtaataatccatcttgttaagctcctgtttcacagatgctcaccctatgggccctgtggtccctttgcctcataccgtagcaaagcctttggcaagaatgctagaactaattctcagcttccttctgtgttcctgtaggacccacagtgcagagggagagttaggtgtgctatttagatttttccttcccaaatacactccttttccattgccatttctattttttgtgtcaaagaatctagttaatgtgttctgttctgtcacttgtggcagcatttacttcttcttcttcttcttttttttttttctttcttcctctctcctggaccagaagggcatttccttaagttatagtctaagttctcagtaccagcgttgctcaggatacctaaaagaaaacttctggaatttagaaaactttttttcttaaaaaaaaaaaaaaaggcttgtgattgtcccttaatactatttgtatactgtgtgcgccaatattttgttttttggaagaataaaactgagcaatgccttccatacggacaaaccattagttctttctcattgcatccttagaataataatcctgatcctccctgagggaatggtgggcatagtcaaaagaagaggaaggttgcctgcaagaagcatgcaatggatatgaacattaaccccaccatattgaataaatattacctagatttactctgtccactgtggtagccaccagccacatgtgactattaagtattagtctaaatggaaatgtgctgtaagcatgaaatacatcttggattttgaatatacagtgcaatacaaagcatttcattaataatttttgataatattacatgttgcaatggttatattttgcatatgcaagcctaagtaaaatatgttattaaactaaattttacctgtttctttttactttttaaatgtatctactagaaaatttaacattacacttttggttctcatttgcatttctaatcacagaaattatatgtgcaaatatattaggagattgtttcaaagaagggaaaatagtaagagcgataaaaattattccaacaaactactcttgtaattgatggtgactgcctacaatgaaatcagtttttgaagaaaaaattacttttattattgtctcatggagtatcatgacatttagcttcaatagggactctgactgtcatttgctgctttccataatttccatttctgatttcataagacttaaaaaattatgtcctgtggtccaaattgaatgtgtaccgaagcacagtaggagaccttaaaaataccttattccattttctcactatgagtttaaccaaaagaattcaaaaagtagagaatgcttcaaaaatgactgaaatagacaaaacaaaagacaagtaacaacagcaacaaaaccttgactacttaagcaccagcatttctcatctggacatttcaatggtcctaacttggttggtttcgatatggggatatgacaaacagctcagtcctttggtgtcccctccccctcctctctgtaaacttctacttaggtgcaggattttacactaccttttcctttgtgacaagcttttcaaattttattggcaagaatactgacttttaaacaaacagttattcagaaacagaaggataatccaaaactacgttgtttccttagggatttttcatattaccagggaattttggaaaccatgatacattttaaaagttgtgatttccagaggtaacattcaaattaatgttcctttctgcaaaatatttgaaaatttaggaaaggaagttcaagatcacaaatcagtaattgagaattgactaaattaaattttactttgaggtttttagtaattttagagtagtggtgtataaattatgggtatgaattacagagtgtgaagtaattatgaataaatctgcatgagttaattagtgtttgtaaaacaatattaagttttcatcttgaatttaatttctgaaaagctattccattatgttcttactttgtggcaatgcatttaatattaactgaggtcttctggaacaaatctttttaacttaaagaatatttcaaatttgaaaatttgagcttgtttgcaaattagtgtgggaaatattttgtgataggtgtgacttttttatttttcaaataacaagtgccaaatagtacccatttaggtcacttactacaattaaacctggatggtaatagttcttttttctaaagaagaaaaatatctaataatcatattaggaggttagggtggttggcggtttagctacatgatagatatccttatttctgttctttggtaaggtgtgtcttacataagagataaagtatatattcaagactttgctttccagataaccagtgctttctttacatgcatatttggaactagactgatttaccattatgatttcctttagtttattcttaaatctcttcaggaagattttatatattttgtctcctaaagaagtttgtaagtcttttaaaaaataaacatatatattagtttttccctttagcctctaatttacacacatagacacacacacacatgcacacacacatacacacacaacatacagtaagtgctaggcctacaatggatttgatataataactagttactagacagtgaaacactgatacattccagaatgtttcaaactctggaaaattttaaattgttttgtcttcttcctgatactgaactatgattctactgaatttcaaataaatagtattttaaaattataagtcaagcacaagaaaatataatggtgtctcattttctggtatggagggtggggctcctgaaaattctcaagcctgttcttgcctagatttctatcatcgaagtatagtcttgcatgcatcagataagtataaatcactagattatatgttctatgagaaaagataccattcctctttttgctattgtatccttaaatagcacagtgcaaaataataatagatgtgtgtcaaatatttgttgaattaacccagctagatcctcaaacttgagttaattatccttatatgaactaggataggggccgtggggtagaggagcggagggtaaagaactttgtttaaactttaggaggtctagtctcaggttctcctaactcgagtctgaagagctagtaggaaatacctgtctttagtgtcacagagtaattttcaggtgagagactgtagcctgatgctaggacttccgttattccctgctagctaagtgtgaacagtgaaaattgtaactttgaaaccttaagttgatatcagtgaccattgcagggctataacattttctgtcttttagctggtatgaatggtacaccaggcagaggctcatttgggcctcccactcccaacaatctcaggacccattgtcaccaaaagatatgggaagaataaataacttgtatcattgagtaccgcacaatgtctttgtcttctcacaaagtgtatgattaatgtcagcattagggcatgtacttgaacgtggcagttcaagactgaataaagtatacttctttttctgagttcttacacaatttgaaaaaaaaatctccaattgtaagaagacctttcataagaacataacagtcacctctaattatcaacattcagctgttctaagatagataatatttttactttaaaacactggatggctaggcgtagtggctcatgcctgtaatcccagcactttgggaggccgggacaggcagatcacctgaggtcaggagtttgagaccagcctggccaacatggcgaaaccccgtccctactaaaaatacaaaaattagccgggcgttgtggtgtgtgcctgtagtcctagctacttgggaggctgaggcaggagaatcacttaaacccaggaggaagtggttgcagtgagctgagatcactccagcctgggtgacagagcgagactccatctccaaaaataaataaatacataaaataaaatactgaacgagaaactttatattttctcatagtttgttcccatagttgcagaacgataacattgatttccaaaatatatttttgattttagcaaatatcattttagcaacttatgaaaaaaattaaaataggaaagaaggaggcctccaatccacatgctacaactagtaaacattatctatatgcctaaaaatctccaggaatatgcaactgataagtttattctaaaagctgagaatcagcctcttctattgttttctctttaagcttttgacatcgttgttagattctgattgtgagataatcaggacatcataagtgacagcttgatcatttagtttcttctttcactccatttaacatttgaatttcattttctttctcttctttttttctttccctgtggttcctccagaatgttaaagattattttgaatgtagcttgagtaaatcctacagttcttccagtaacacacttgggatcgacctctggagagggagaaggtgttgctcaggaaacttacagttaccaccactgtctcaaagacagagtgaaagggcaaggactcctgagggagatggtatttccaggccgaccacactgcctttgacaacgcttccaagcattgctattacaactgtaagccaggagtggtgagtagcctcaaaatcaaatgtcaattctaaatttttattttccaatttctccaaatacaatttcatagtattaaaatgtgagttttctgtgaaatacctaagatgattgacattttgagaattcgtttccctttagaatcaaagataaggtcttgtaaacagtggagatattttctagttcttcagagtggaaggaacatgcttcatttaaagctactgaggaaggaatgagatacatttacattaatgtaaagggataacaaaattactgcttatgatctaacttttttaaaaagagctatacagtgtgcatcagtattttttgacttagaaaaacaaattacatgttactatatgtatatgatgttcttattgctgaactctacacttctccctagcttctatttattatcatcctactttattaatctcagtttgtgattatctataaaataaaacatttcattgtaaattgaaagagtaatgaaaattgcgctatgagagatgctggcactgttgtgcagagtctatatttgtgaaagaggctattttaaaccagtgttgaaaagttaatcatataatcttacaattgtggttattgtgccatgactgcttcaaatatgtgctttattatatatttaataattagtacattctcacttttccttttctgttttcctacatcattttaaaatatttttcaggaaggattggcttacatatcatggaggtttatcatgaaagtgaaaaatattttctctgatatgattttaaattaataatgtgttgcttttaaaatcactttttgtttacataatttatcaagtgaaagactaagcattaaattattgtacaacattattgtagtaaattattaaaaatctattatttttatggtgtaccatgtacagagctctgccacatgctgagctctccagggctgatgagtagcccagtatgtgctctttgaataatgatatacggcatcttgacatcctttagtcaatgtttacctgacacactgagcattagatcactgaaactccaggtatcacagttaatagcatcaaatatttaatcagacaatctgtgtgatagagaatcatgctaaaacattttaaagaaaatgggttaaaaatttgagaaggactgtcttacatcttctgttcagctgaattaacattatataagagtcatagccaatcatggagaattaaaagggcacatagggctcccctataggatactcaatcacatagcttatgtgattagtcttgattatgtgtctgtataattacggatttggagtcttaaagatttccagatttatttttcagcaggttggcagtgatacaattctatcagttgttaaagtattgaaatgctttcataccagttggtaaatatatgctttcttgagctctctgattgcccctactactctcgcagactattctcctgaagcctctagaatttctcacaatctaaaaacaaagaggtgaagactggcacagaggaatctggttttggtgggtgttggtgctatatctgttgttagctattttgagtaacaccctgggtaaaatgtacagtgccttgtaaagtttgagttcatttaattcaaagacattttgggagttgtagaattgttccttccttagaaatatcaaatctagactctgccatttggggcatgcttgtttctctttcctagttgaatgtttttatttttaaaggagggcaataatatttacctcataggctattgtgaggattaaatgatgtaatctatctaaggtattttgcttagtaaaatgcatatggtaggtaatcagcaaatgttgatttttgtcctcttgatcattatccaataaatattttctggaaattagaaaccatgtctctagtatcagtagcctcattcttggcgtcagtattttaggttgaaatggaaaatttagccattattcatgttcaatagtcagtgagcaccacatattggtaattcatttataacatgtgtgttttatttcaattaacaggatactttttaaagtatgagaatagagtatgcagataactctgaatttattttaaaacataagtaactaaaagcatttctttttttttttttttttttttttttttgagacggagtctcgctctgtcgcccaggctggagtgcagtggcgggatctcggctcactgcaagctccgcctcccgggttcacgccattctcctgcctcagcctcccaagtagctgggactacaggcgcctgccactacgcccggctaattttttgtatttttagtagagacggggtttcaccgttttagccgggatggtctcgatctcctgacctcgtgatccgcccgcctcggcctcccaaagtgctgggattacaggtgtgagccaccgcgcccggccctaaaagcatttctgaacatctcttgaaaatccagcttccactggaatactgatagctgaagactggtggaattattggtgaaggaatctgattaaaaaatgatttgactagaagtgagggaactgggttcaaattatcatcaatgccatcaacttgatgaaagttcatagagataaggagtactgcctaggactacgtgagagaaagaattatgcttaccacttagagtaccaagaatatggaatcaatttccatgccaagaccagcaatgagcaaatgttttctctaaaggaccagatagtaaatattttaagttttatgagctttgcagtctctgtcacaactactcatccttgctgttatattgtgaaaggagccatagccaatgtgtaaacgaagaagtgtagctgtgttccaataaaactttgtttacaaaaacaagcagcaggctggatttggcctgccagagtttgccgactttgaaaagtctcccttagaaaagtttccctttctaggctagtaaagatctctaagacgtgatcctaggatttgatcattgtttttacagttatcaaggacaaaaactgactttgaggtcatggctgatgtgccaaataagtcataagtatgggactgtgtgttctagatcaagccatcaaagacagtgaaataatttgaatccgttctaatgaaaagtactgcctaattttatataaggttttatataaaaacattaacatgattttatcatatgtttatttggagaaaacaggccatcattacagaaaaaaggccgggaatataagaatagtgattttatttgtcatggagcaagaaagagttagaaaggactcaagcccagttttattgggtgacttccattttgtagcctttcagatgagtttctattataatacaatctccaaaagacacaaatgaacaaacaatggagattacaatacctacacttcaaaatcatgtggaaaattaaagaaaaggtttgctatgcatgtagcacaatcacttgttcttaatggttattttgatattattattattgtcatttttattgttacatttagactgagtagccaaaattatgcattttctattattggaggttttaggggaaacttagctcctgagttcttggaaccaacttggaaatatgatgaaagaggaattcagatatgaaagcaagatgttatctttaatactgataaagttgatactgaaaaatataatttatgtctgtgggcaagtgggttcctaatattgaaacctataattgcatagatgctagacctgggcaggatcccctcacctcttatacacacataaatagaaggcctacccctacaaaacttgtagcatggaggatctgtagaaatcctactcacgtgagaaagtagagggaaggattgaactgtacatggccagttcccccttatgaaaacaccaagaaagattaaattattcattctctctgggaaatagtgagtaaggcggcagaaagaggctggaaatgtgatgctggtggcattccagacacttgcaagacatatcaaacatttcccaatttttaaaatcttttcaccttaactttaggggcacattagggatgtgcctgttctttagaggaagatatcaggagtataccagtactaacttactgccatctttgtgaagctgttctcccaatattgaccactgcccttttgagtattccccccaaccccctcccccacaaaaatctgaattcaaagtttcctgctcttgtaaactgaagttcaaaaaatgaagttctcacatttatcttccatgtcttcttgattttctcattttgttagcaggaccttgaagcatggtttagaaggagggtttcctaaccagctgcagcctaagtcatcttccactgtaaaggctgtagtttcttcaggcccataggaattgtattcgtataataccaggtctctgagggacttcactttttaaatagttactgatctataggttatgcaatgctgcataaccaaatttagataataagccaattctgggccttgaacatctatagttaatctataactttaatcttcttacatgagggtcttagaacactttactctttcaagcccttccctgcttacagtttgtttttgtgtattttagttatttctctctctctgtatatcttaccacacaatacattagcattattttttgcattcaccgtttgatttggattttcccagatacttaccaatgttttggttttaattcctcctcatatcttagaacctctgctggaattatttgcctttttgcctgaagtaaattcttcagaatttatttcagtttgtctgaaaatgtctttactttatttcaacactttgaaactatttttccctgctttttgtcttctgttgttactattaggaaatcagctatcactctaattgtctttcttatagataatctgtcaattgttttttgtctctggatttgggcagttgaactttgatgtgcctaaggatggatttcctttcatttatcttatttgggatttcccggacttcttgaatatgtaaatttatatcttccttatcagatctggaatattctttcattacctcttcaaatattttctctgccaatctttctcctctgctgttggatttctgattaaatgtattttataaacttctttgtcttccatttctcttaatttattccacatttttttctcattttgtctttctgggctgcattctgataattgtttctaatctgccttccagtttgctaatttttttttttttttgagacggagtctcgctctgtcgcccaggctggagtgcagtggcgggatctcggctcactgcaagctccgcctcccgggttcacgccattctcctgcctcagcctcccaagtagctgggactacaggcgcccgccactacgcccggctaattttttgtatttttagtagagacggggtttcactgttttagccgggatggtctcgatctcctgacctcgtgatccgcccgcctcggcctcccaaagtgctgggattacaggcgtgagccaccgcgcccggccgctaatttttttttcaaactatgtctcatttgttattaaacctattatatttttttaattttgattattgtatttttacattttaaagtttgtattcatgtatttaaaaatacactagataatgttatgtggttttctattccctgctatctattactgcatagcaaataatcccaacatttactggcttaaaataacatttttatctcagagtttctatgaatcaggaatccagctgtggcttagctgtgtgcctctgactcagagtctctcacaagactggaatcaagtaattggccagtactgtagtcatgcatatgggtggaaaggtgggcagaactgcttccaacctgatcaacatggttgttgacaggctcaattcctggctgtggctgactagaaataccagttccttgccatgtgggtctcatagacctatgtgaaggctatttataacatgtcagtttggtttctccagagcaagtgttttgagaaagagagaccaatagagactgagcaagacagaggtcaaagtatttttacaacttagtcttagaagtgacatcccatcacttttatatattctgttcattaggtcttacacatgcacaggggaggggattctgcaaaggaataaacaaggaggtggagatcattggagatcagtttagaggctgtatattgcactgcagatattttcaagcttttagagagcaagaatagttattttacccttttgctcattttagtaactaaagttttcagtgagtctattttctattatctgtgtttcctgatagtttttgctcatgcttttaaaaaactttattaagaaaaatagctaatgcatgctgggcttaatacctaggtgatgggttgataggtgcagcaaaccaccatggcacatgttgtatgtaacaaacctgcacatcctgcacatgtaccccggaactgaaaattaaaaaaaattccttactactatttaaaaaaactttattaaagtacaatcagtgtgcaaaaaagtatacctatcataagagggcatgttgataaaatttcacaaattggacacaaccacaaaaccaggaacaaaatcaagaagcaaaactttactagtgtctcagaagctcttcttatgcaccccccgagcccctgccccatcactacctcctccatacctccaacaacatctattagttttgtctgtttttgaactttacataatggaatcacataatgtgtaatattttgcatttgacttatttattgccctcaacattaggtttaagaggtgtgcttaattttttaaaatttattgtgtgctgccacaataaattaaatgtcattgaaacattatttgtaggcacagtttaaggtatcagaataaggttcaccatagagaatttgcatttgattctatcaggtctctaggggcactggggcattggtagattgatcagagggtttctcaatcatctagctgaaacatgatcataatctgttaaggtccactgcctatgaccccacgccctcaacccctggccctgcttgaattatcactgaggctacccttctggcagtctcctggatgtagagtaggggtgtgtttacttctattttacctttgcaatgagaaaatagccctttgaagttctggtttaagttgggaagactctccttttgaatgcctcaccctggcatggctgggctttgattacagttcccccttgaccctcaaggacatcagactaatattaacttttactctgtgtggtaaatatcctcagggcaaaagcaactttgacgtccattatgcacctttggtgagaaaagtccccttacactttgacttgctatttccttactaacttggcatttctttagtagcatcaagaaaataagatgatagttttccttatttttaaagcaaaggttttgttgagataaccttgtgaacaatattacagaaaactttcatagctacttgctatggagatcttaggtcctttcatcccacacttgttttggctataaaattgcctttagtacattcttaaactgaagcttctgatgataattcttaagtttgtgctcctaagggcctactgggacctatttctttgactttttctcccgaagacactatctttccccagtatctgaatgtttttggctttgagtaaaatgtttgcttattttatgtagtagatattagtgtctttactgttttatctccctttcagaaaggaacatctgagtttgcaatagtttaaactgaatcttgttttactgtcttttcttcctttgtacttgtaggcctacatagaattgattacttcacttcttttgctttctcttgctacttgatctaggtattgttaattatccacggatgaggataaataacaaatacacacacacacacacaccccttaggcatatcatattcaaacttcagaaaaccaaagacaaagaaaaatctctaaagaaatcaaataataaaaacagacatatagaggaacaagaataagaattatactggactgtttgtcagaaaccatgaaagcaagaagagagtggagtacattatttaaagtgttgaaataaaaactttcaccaggctagaattttataaccagcaaaattatccttcaaatgtgaaggagagagggagactttttcagagaaacaaaactgaggaaactcattgtcagtagacctgatttataagaccatgttaaaagaagttattcattaagaagaaaaatgatatagggcacagatctacacaaagaagagtgtcagaggagaaataaatgaagataagataacattgtttagttttttcaagctaaactttcttaactatataaaacataactgtttcaagcaataccaacaatgcactgggtggttatagtataggggtaagggaaatgaaagacaacagtgtgaaatgaacaagcaggagcaaatgggaatattctgttttaagatatatatactacatgtgaaggcagacttaggttacttaaaatataaatatgtattatatataatatatgtaaatatatataatatgtattatatatataatatatgtaaatatatataatatgtattatatatataatatatgtaaatatatataatatatattatctttatcacatctggtacagcagctgcaattggagtcatcactttgttaaacttatgataaggcactgtcattctccaagatccatctgtcttctgcacagccaaatgggagagttgaatgggaataaccactcgtgcttctttcaagtccttgatagtggcactaatctccacagtccctccagggatgcgatattgtttttgatttactatttttctaggtagaggcagctctaatggcttccatttggcctttctcaccgtaacagccctcaccctaccagtcagggagccaatgtgggggttctgccagttgctaagaatgtctatgcctattatgcactggggaaatgaccacaggatgagtccgggaacccactggatccactctttgttggacctgagctacaactccattaattacctgacctccataagcccctgctttaactggaggaccacagtgacattttgggtcctctggaatcaatgtcagctcagagccagtgtccactagttccttaaatgtcgatcatttccctctccccagtgggcaggtaccctggtaaaaggctggaggtctccttggggaaggatgggagaaagattcactgctcaaattgtcgataacgtagtgaggtccttcctcaagggtacctggcctccccttcattcaaggagttctgggtctgtaaactggctcaagtctggaaatcgattgaggggccattattctctgtttttataatttaaattagtcttttgtccattcgacctagaagttttctgctagtataaattaagtacgaatgcagtaggcttcctatcaatttcacttctaggaacaccgtgattaattagccaatgccataactctacacgagtcagaccattctgattgccactttgcctctgctgtccaataaggtagctacgcccaccttgcctttgaaggttgagtgccaccacttggctcctgccacctcaggatctaattactcccattgtatttaaattttgtggttgagtgactgcagttcccactgttagatctgacatacagagaagagcaattacagggctcttcaaagatgcaggtgccaccctcgcaaatctattttgcaaggcattggtcaagggtgtatcttctggaccctcccagctgggatgagaggtctaaagtgactaatccactccatcatcccaatctccctaagcctctggatcccttcctctccattaaaccaagggagatcaggcatttccagcttgcttacagtgggccatcttttagtccatatttcagctaaccaagcaaataaactattagaacattttttaactcaccaagctgcaacattagaagcagagttcctatgtagtgggcccaaattaataaattcggcctgatccaactctgtattccttccaccattatcccacacccttaatatccattcccatgttcttcagatttctgtttatataaatgagaaaactcaagcagttcttttccagtgtagcgcacctcctcatgggtcacactctcaaccttacttctaggggcccgccgggactttagtctagttataggtctagaagcaaacaggcaggttgggggtggctcctgaggagaatcagcattaccttgcctggcaaccacctcaggggaggccatcactgttgcctcaggcggcacagggtttatctcttcagacaaaggtagaaaggctgatggcagcatgggtcggggaggggatgttgccactactggggatggggaagctgttccttctggcaaaaaagattcatcagagtttacaaattcagtatccccagcttcatcagtgtcttcccacatgttcctgttccaagttgcagggtcccattcttttccaatcaatctcactttaatagacacctggtgaggctgtgcatgcaccttctgttgcaggtcacccactttcatgataagagtttgtgcctgtttttccataattcccgctctttctctataggaaataagactttcacttagggcaatcttaacagacttgaggttcagtatttgcttctgaagccaggagacagaatccatgagtttatcattttctttcatcactttgtccactgaacttaggcgcaaccaatcagcttcattacgttccttggttctgcacatatggtcaaaggtattatgtatagagtcactaaactccttgcctctcatgagtggtgaattgggagtgtcaaatgcatttattttgtataactctctaaacaatccatgccaaggactatcagtgttctccatactattagaagtagaatccttagcatttttgagtctaatcatattaagcagccaactccagaaactcccaaactaatgaaagaactccattcttaaaatactgttcctctagaaccattcttggtaccaaaatctatatttgccagagttctctagagggacagaactactaggatacaaagtcccacaataagctgtctttaagcttgagaagcaaggagagtgagtctgagtctcaaaactgaagaacttggagtccaatgtttgagggcaggaagcatccagcatgggagaaagatataggctgggagactaggccagtctctccttttcacgtttttctgcctgccttatatttgctggcagttcattagattgtgcccaccagattaagggtgaatcctctttcccgagcccactgactcaaatgttaatctcctttggcaacaccctcacagacatgcccaggatcaatactttgcatccttcagttcaatcaagttgacactcagtattaaccatcacagagggccactgttctccagactccagaatgatagatccactggcagcttgtaccctgcacctggaaaagctacaggcattcaatgccagcccttgagagcagcattggggggtcgagccctggaaggccacaggggcggagctgcccaaggccttgggagcccagcccttacatcagtgtgccctggatgtgggacatggagtcaaaagagattattgtggagctatacaatttaatgaccaccctgctgggttttggacttgcatagggcctgtagccctgttcttttggctgatttctctcttttggaatggaagtatttacccaatgactatacccccattgtatcttggaggtaactaacttgttttttattttacaggctcataggcagaagggactagccttgtctcagatgagactttggactgtggagttttgagttaatgctggaatgaattaagactttgggaaactgttgggaaggcatgattgtattttgcagtgtgagaaggacatgagatttgggagggcccaggggcagaatgatgtggtttgaatctgtgtcctcactcaaatctcatgttcaattgtaatccccaatgttggaagtgggacctggtgggaggtgattggatcatgggggcactttcacatgaatggcttagcaccatcccctcagtgctgtcctcatgataatgagtgagtgagttattgtgagatatggttatttagaaatgtgtagcacctctcccctctctctcttcttcctgctccacccatgtaagatctaactgcctcctcttttccttccaccatgattgtaagtttcctgagacttccctagaagcagaagcagctatgcttcctgtacagcctgcagaacaatgagcgaattaaacctcttttctttataaattacccagtcttgggtattcctttatagcaatacgagaatggcctaatacaaaaaggtatacagtttgggagagaggaaataaaattatctttgcagatgacatgactgtctttacaaaatatcctacagactggcagaaacaaacaaacaaacaagaaacacctctccttgaaggaaataataatcaatataacaaggtttcagtatacagagttaacatacaaaatcagttgctttcctatacactggcaatagacaattgaaatttgaaattataataataaaatgtcatttacagaagtgataccctccttcccccaacgaacccaccaattcaacaacaactcacagacaaattctcttactgagaaatccaaaactagttgagagcctcctgcacccagacacatcaaatcccacaggaaaattcaggacaccctcatgtctgaatccctacccacagctcaatgccacatgattgaaaggaatcatagctcccagcttctccctggagagtaaaagagttggaccatgtgtatgacactcttccaacttcttcctccccaaaggatgggcctttctctttccagtcttggagcagtaatggaacccagcataatctagccatccaggggctggtaagaacaaagacagaagtttgcactgacagttaccatatcctttccctcagctcaacacagagcaagaaaatgaaaaatccctgcttccaacatcttcttgggaagggaagagttagtctgcttggccaatgccccagtgtttctgggagcttcccaaaggacttcctctgtctggcttgttttggggtacttatgggacctggcatactctagctgccttggggccaatgagaacaaatatggtggtttgatctagcatgcaactagatgatgcagtcccacccacaagctcagtgtagggtgaacaggtgaaaaaccacagatcccagcttctctctctgtgtgtcatgggaagagttggaaagggcatcaaatgattcaacttttctgggggctacttgaggaatggccccaatatcacttctattggaacactgattgtacctagcatactctagatggtagctgctaagaacaaagaaaacagattggcaggttggagaggccccgagaatccatggctgagctggttagtgagggtcttctcctttataagtttagtctgtgaagattgggagaggtcactgttttgtctaatataccaaccctacacaaagagtcaaggaaaataaaaataacatggaaatggattccaaacaaaggaacaagataaatctccagaaacaaagcctaatgaaagagaaatatttgatttacctaacagagaactcaaaataaccattatgaagatgttcaccaaaaccaagagaacaatgcatgaacatgagtatttcaacagagatatagaaagtataaaaagtaccaaaaagaatttgtagagctaaataatacaataacagctcaaaaattcactaaagcagtgtgacagcagactaaatcaagcagaagaaaagataagcacacttgaagacaagttattgttgttagaaattattcagtcagaagagcaaaaagaaaaacgaatgacaaaaataaagacagcttaaaggacttatgggacaccatcaagtggaccaatgtgcacattataggagttcttggaggagagaggagagagagaaagaaccacaaaacatattcaaagaaataatagcacaaaacttcccaaatctggggaagaaaatgcacattctactctaggaagcccagcagataccagatgaaatgaacggaaagaaacctacactgagatacattataattatattgtcaaaagtcaaggcaaagggagaattttcaaagtagcaacagaaaagtgatttgtcatgtacaagggatttcccataaaactaaaagtggatttttcagtagaaaaccttgcaggccagaagggagtgggatgatatattcaaagtgctgaaattaaaaaaaaaaaacctgccaatgaaaaatacttggcatgccaaaattctccttcaaaaatagagactttcccagacaaataaaagcagagaggctgggcgctgtggctcatgcctgtaatcccagcattttgggaggccacggcgggcggatcacttgaggtcaggagttaaagaccagcctggccaatatagtgaaaccccatctctactaaagatacaaaaaattagctgggcatggtggcaggcgcctataatcccagctacttgggaggctgaggcagagattgcattgagccgagatcatcgtgccattgcattccagccctggcaacagggcgagaatccgtctaaaaaaaaaaaaagtggagagttgatcagcgccatacttgtcttaaaaggaatgctaatggaagctcttcaagttgcaacaaatgacacaaacggtaacatgatagcacaagaaagtgaaacttggtaatgataaatatataggcaaattcagactactgcaaacactgtaactgttggatgaatcacttttaattataaagttaaaagacaaaagatattgaaaatatctgtaattaaatattatttaaagggatatggaatatagagagatgtgaattttaacatctataacatagtgtgtgatgggaaagaagtgcaagtgtagagaaattgaatgtaagttgttatcagtttaatatagactattttaaataaattataagatagactaatagatattttatgtaagccccatagtggccacaaagaaatacctatagaagatacaaaaaaggaaaagagaaagaaatcaaagtatatcagtacaaaatattcactgcaacacaaaggaagacagcatgagagagtaagacataggaggtcaaggtaggaggattacttgagcccaggagcttgagatcagcctagacaacatagcaagaccctatctgtaaaacaatatatttttaaaattagttgagcatggtggcatatacctgtagccctagctgctcaggaggctaatgcaggaggattgcttaagcctagataacaaagagctatgattgtgccagtgcactccagtctgggtgatcctgtctcaataaaaaataaaagacagagaaagaataaaaagacagctgtcagaaccacaagacaaacagacaacaatgaacaaaatggcaatagtaaatttttctctatcaatgcttactttacatagacatggattaaattcctcaaccaaaagacaaagagcagttgaatgaattagaaaaatcagagtaaactatgtgctgtctataagaaactcactttagatttaaagacacagatagtgaagggatggaaatatatattctatgtaaatggtcaccaaaggagaagtggctatacttatatcagacaaaatatatgtaaagtaaaaattagcacaagatacaaggaagaacattatataataatgaaaaggtcaattgaacaggaagatataacacttatatgtacccaacatcagagcatctaaatatataaagcaaaaatcgacacacctaaagaaataatacacaaaaaatacaataattataggaggcttctttaccccatttttaatagtggataaaacaaccagacataaaataacaaacagcagacttgaacagcactatagaccaaatgagcctaacatacatatataaaatattcatctcatagctgcagaatatacattcttctcaggtgtacatgaaacattctctaggatacatcacatgtcaggtcacaaaacaattcttagtaaaattaataggattgaaattataccaaatatctttttggagcacaatggaatgaaactagaaatcagtagcagaaggaaaactggaaaattcacaaatatgtggaaattaacacactcccgatatcctagtattcttcgcttaatgggtcaaagaaaagaataaggaaagaaattagaaaatattgaggcaaattaaaataaaaatacaacataccaaaacttatgggatgcagaaaaaaaaaaaaagaatgtgatatgctggtataggacatttaccatgaatggaattaacaggattgattatagctctgggtgagtcagtgagtgaatgtgaaggcctaggatgttactatacactactatagattctataagcactgtacacttaggctacactaaatttacaaacaaatatttttcttcaataaaaaattaatctgagcttactgtaacatttcgttttataaaattcttaattaaaaaaacttcttaactttttatgataatacttagtttaaaacacaaacacagccgggtgtggtggctcatgcctgtaatcccaacactttggcaagctgaggtgggtggatcacctgaggtcgagagttcgagaccagcccgaccaatatggagaaaccccatctctaataaaagtacaaaattagccatggtggcatatgcctgtaatcccagctactcaggaggctgaggcaggagaatcacttgaacctgggaggcggaggttgcggtgagccgagatcacgctgttatactccagcctgggcaacaaaagcgaaattctgtctcaaaaaaaacaaaacaacaacaacaacaacaacaacaaaaacacgttgtatagctgcataaagatatttgttatatccttattctataagcttttttctttttttttcttttttacgttttaaagttttttgttaaaaacgaagacacaagcacacacaatagcctaggtccttgcaggatcaggatcatcaacatctgtgtcttccacctccacatcttgccccactggagggtcttcaggagcagtaacacacatggagttgccatctcctaggataacaatgccttcttctggaatacctcctgaaggacctgtctgaggctgtcttacagttaacttttttttaatatacataagggtatattataaaataatgataaaaagtcagcacagtaggtttgtttacaccagcatcaccaccacaagcacgtgagtaatgctacgacattattatatcactaggcaacaacaatttttcagcatcattatagtcttatgggaccaccatcatacatgtggtccatctttgacccaaatattattatgctatacatgactgtattggaaataacaaggaaagaaataggagaacctcagttcccaaggtggagatcagttgttgttaaatattagagtgcgtcagaatcacctgaaggacttattgaaacacagattgctggacccttagagttgagtgtctagggtaggacctaacattttgtgtgtctaacaagtctccaggtgatagttatggtattggcctagggaccacattttgggaactatcggcctagattttctccaaaagtaggaggttaggtcaactgctgagaataagggaaagtgggcccttgaactctcctttcagccaaaggcaggcatgttctaaacactgaatcatgttaaaagtgaattttaatctgggggcaattctatgccaagccaactgattagtggtgggattaattcctaggttttagataacagcactgctttgcaaatgctcacagcttaatgataccatagaattattatcagcctcattttcacttgtgtaggaagaggcacggaaataaagaaggcaggagtcttctttcaggtttccttatggtggactctttcataagaaacagttctggcttctcctttgttgttccctcaaagaagattataaatatggttgcttgtctcccacctccatctgcctgagggctgtgctttgcttctgtaaatgtttcagttggaacatgttgattctgtttgagcatctattaacttaggtgtgatgtctaatgttcactgtctcaacgttcacctccactggggagagtggtggcgatttccctgcctctgtctaaggctggaaacattcgttattgtggaggggaaagtggttggttcactgaggtgggggctctgaaacacaggatgtgctttattgctcccacagtcagtcacaagttgacagtcgcatgaggctttcaataaaaatattttatacttttgtgctgcctctcagctgcagatcctaaagccctgttttaaagatcaaaatacccatagatgtgcaaatgccagggattcaacaaaagctggtgcatggatgggaaactgatgacacacacatctgttcagctctcatcaggcttcaccacccactggaatcttttggctacagaaactgaatttgtgattcgtgcttcaagtactgcagtcaacaactcagcaattcacaaagtctcttctgtgattgccgtcttaggtatgtgaggtaatggacaatggatatttaaaattgtgcctcaaccctgctttacctcatcacttattccggtatcagccaaatttatattagaatatgggaagtgcaggttttatataaaaggtgcctaggatagattctggcctatatagctctaataattggtataatactttacaatatagatgatattctcactgtaacacattatagtatacaacgtccattctgtcccctactttatttaaactcaactccataagaaccttgtgagatgggcattattccttaaggtaaaagaagaacaaacaaaaaatggctgcaaccaaaatgtaataattggtgtgaatagttttataataaaaaagaaagacttcactttggatatttgatggctgacacctttcagtttcccacctatcttcctttttctccttagccccacatcctgagaagataagagaacctgggctctcctccactggtgcccatggggaagttcaaaccacacaaatccctgtcctctaggaattctcattctagtcccaaccctcttaactatgataaaaactctaaaccatcaacaccacccccatcttgacttgtgtcaccttaggtagaatctgagcccttcaccttggggaatatgtgagtagtaaactttattttatatctgtaattcctatgttttattcatcctagcattcataaatttctgaggatgctggatgttcatataaataggtttattagctttagatagactaatgatgctttattcaaatgtgtggttatttcagatcaaagaaaaggaagcattgtgcttgacacagggctaagaactgaaaaatgaacaaaatatggcctgtgccctttccttagtagttatggtctggtagaaaaggcagacatgtacattaaaaaattataaaacagtgtcatatgtagcatgtacaagttattgtgggaatgcagaagagagagtggctggtttttccttggtttagcaatatgtgtgtaaagtcataagagcatgaaagaagattgtatgttgaggaaactatttttagttttatttggttggagagctgtattagtgtggagagatgcaatttgaaagggccttaaaggctctgctggtacattggattttatcctgagggcattggtgagttttgaagggctttaagaaatgaaataaaagaagaacacttttgaagagttcactttgatagcagtatggaagatagatgggagccgagacagaaagatacttgagaacaatactactttagtccaagtgagcaatgacaatggctaaatcaggacaaaagcagtgagaatggttagaggaggacatgtgccagacactgttccaggtgttgggatataaggttgaaagaggacagagaaattctgttttttatgatgtttttattctaataagggtatagaagagaaccattaagatccattctcttctctccagcagtaagaaaactccacagatgcagctgaacacatgactacccagaaaatagactacttttcagcctttgttgcagcttcctccaagtctagctatactaggttctggccaaatcatgcccttgaaatgaagaggcatcctcctcctttcccttttccctttctactggttggaatgggtacacagtgatgagatttcttgcaccatgtagccaaggttaccacaggcctgatagaacagcaagacaaaagggctctgaatatgtagcaacttcatggacagctgtcataccaggctgaactttaatgtgaaataactaaaattctgtcttgttgtttctgggtgtctcttcatcacagaagctgagcctacctcataagtaatactgggggagatatacagtcataatggagatttacatgaagagaatgctcaggtcttgaaccccacaaaggcagtcatctaagtgtataaataagttatataagtataagctgaagctgagtctcttaagcttaatatataattattcaaaataagtactagttgtaatttatatgcaaggaaaagctttgtagactgtctgagctagtcagtgagggctcctcagacaagaaagatccacttacgcaaggcacttacacgtgggagtgccagccagtgtgatgaaagagagactagagctgaatatctcatcctatgtctcattatttgaggaacttactaatcctgtattaagaatttggttaattatttgataaaggcatgagtttgttcattgagctgcaagctgattacagtagtaattacaataactaacaagaaaactatagaatgagataaatataataaatgaaataaacaaggtgatgtgatagagtaaatataagctgagcaaaagaatgctgctttagacaagtttgctacggaagtcctccaagagaggtgatgtttgattgatacacaaataataaatggcagttattgtataaaaagtagggggcagggtaggaactttataggcagagggactacaaatacaaaagctctgaggtgagaaagagcctggtatatcttcataggagaaaaaaggccggggtgaatggagaatggaaagcgcgtggggagaaagaaggaagttgaaattgtagagggagggagcaattagatcatcgaactgcttgtaggctatattaaggaattttgttttattctaacagcaaggggaagccattgtacagttttaaacaaaaacatgacattatttgactttaaaaaaataatgttttggttatgtatagaatgaaccatagaagcaaagtggaagcagagattattgcaggaaggtaatttgaaacagggtgatgccagagggaatgggaacaagtgaaaggatttaattgctttttagaaacattgatagggcttactatgagatgcaggtagaggtctgagaaaagaagtcttcaagaatcaatcatgctttttgcttgatttgctaggttgatagtggtaccatttgctaaagctgaaaacactcagggaaatattttttggggtataaaccaaaagatcaattttggacaagtataaaagtgttgatggctataggaaattaggtgtatgaatctgggtttcagacgagagagtgaaatttcagatgagagagagaataaatatagtattaatactttaatagctcattttatttataaaatatttcaaatatactaaaagtacagaaaataatttcataggcataatctcttgatgtacccaccatatagatttaacaaatgttgatattttgcttttttttgcttcagaactttaaaaaatataatgttgcagataaagttaaaggatgagagcattcttaaggatgatgggaagacagaggtttgaatgttatcttacttcttgttcactcccaatgctacctcttctgccagcagacaggtcctagaggataggaatgaagcctcaggttctgtcacagtcttgccaaggagtgcagaggaatttctcttctttgggaagaggagagcttgggcatcagcactgaagagccccaagattaggatcagaatgcctggatcctgggacagcttcgctctcagaaactcataatctcccacaaattcacatctaaagaaatataccaaaattcttatttccggattcctaaaaactgagaagtgaccaaacaggcagctggaccttttctatctcttgggttgggagagcatgacgaggccagagcaagaagatcagaaaggtttccttctgatgccttgacgtggcaccagcaaggtgtcctttaccagaggaaaaaccagaaaggagaaaacctttaagatatacctcatgaaatagagttactgggggaggcagacagtgacccatgacaaaaaacaaagtccttgggagattcaaatacaaaacagaaaaaaactttctggaaccaaaataattttaagaatttgacacaaaaatatgtatacattgtgaaataggtaaatgacaacatgtgcattacctcatatacttatttttttgtgatgaaacacttaaaatctattctcttagcagtttgcaaaaatatagtatgttggtgttaactgttgtcatcatgcacaatagatctcttgaacttattcctcctaggtgaagttttgtattctttgaccgacattgcctcaatccacaatctctccattttctctggcatcagccttttcaaatcaccttcctgcgatagtctctgcttccactttgtccctacaattcattctacccatacccaaaacactatttttcaaagtcaaattacatcatatttttgtccaaagctgtgtaatggcttcttattgctgttaagataaaacaaaattccgttccatagcctattagcaattaggtggtctaactactccctgcctctaccatctcaacttccttctttctcttcccttgcttttcattctccagacacaccgacctcttcagtccctgctaagcataattctactctccacttctgagttcaatttttttacactccatatataagtgagatcatgtggcatttgtctttctatgcctggcttatttcacgtaacataatgtcctccatgtccatccatgttgtcacaaatgacagaaattccttcttttttttttaaagaataaagaatatttcttttcatatatatgccacattttctttctctgttcatccattgatagacacttaggttgattccttatcttggctattgtgaacagtgctgctattaacatggtagtgcagatattcaacatagttatttcatttcctttagatgtatacccagtagtgagatttctgggtcatatggtagctctatttttaagtttttgagaaaactttctactgttttccacaatggctgaactaatttacattttcatctacactgtaaaagggtttctttttctccacatcctcttcaacacttatctttcacttatttgataatagccattctaacaggtgtgaggtaatatctcatagtggttttaatttgcatttctctgatgattagtgatgttgaacgttttttcatatacctattgggcatttgtgtttcttcttttgagaaatgtctattcagatcttttgtccatgtttaaaattagtattgagttgtttgagttccttatatattttggctattaatcccttatcagctgtgtggcttgcacatattttctcccattttgtaggttgtctctttactctgttgattgtttgcttggctgtacagaagcttttcagtttgatataatcccaattgtttatttttgtttttgttgctcatgctttcaggtttatacctaaaaaaagtattacccagaccagtgtaatggagcttttcccctatgttttcttctggtagtttttcattttcagatcttacatttaactcttaaatcaatttttagttgatttttgtttatggtatgagatgagggtctaatttcattcttttgaatgtgaatatctagttttgccaacatcgtttattaacgaatattctcattgtgtattcttagctcctttgtcaaaaatcaattgaccattaatgtgtggatttatttctgggctctctgttcttttggtctatgtatctgtttttatgacagcaccatgctgttttgattattattgctttgtggtatattttgaaatcaggtagtgtggtgccttcagctttgttatttttgcttaagattgctttagctattcagggaattctatggttccaaacaaattttagaattggttattttatttctgtgaaaaaatgccattggaattttgatagaaattacactgaatttgtagatcactttggatagtatggacattttaacaatatgaattcttcaaagccatgaacatagattccctctccatatatccgagtcttcttcaatttcaatgttttacagttttcaatgtgcaggtctttcacctccttggttaaatttatttctaagtaatatttttgtaggtattgtaaatgggattgttttcttgatttcttttgtggataatttgttgttagtatatagaaatgctactgatttatatgttgattttatatactgaaactttaccgaattttgtttaatagttctaataattttttgtggagtctttagggatttttatttataagatcatgtcatttttacataggaacaatttaacatcttcttttccaatttggatgtcttttatttctttctcttgcctaattgctctggctaggatgtccagcagcatgttgaatagaagtggtgagagtgggcatcattgtcgtgattcatatcttagagggaaagcttttgacttttcacctttggatatgatgttagctatgggtttgtcatatatggtctttacagtgtggggtacattacttctatacctaatttgtttagttgattttattatggaagatttttgaattttgtcagttgctttttctgtatcgagaggatcatatggtttttgattttttttttagatttgcatatgttgaatcatccttgcatccctgggataaatccaacttgattatggtgaatggcccttttaatgtactgttgaattcagtttgctagtattttgtgatgatttttgcatctgtgttcatcagggatattggcctgtaattttctcttcctgtagtgccctgtctggctttggtatcagtttaatgctggtctgaaaatatttatgtagctcaagagcaagattagatatagaaatgtggacttataagttttggggcagataaattgatagttgaatgttttatagacagggaaatggaatccacaaatgagtttctagaatgagaaaaggacaacatttgaaaggagggggaatgcaaagagcaagttaagacaatggagatgaccagccctgaccatacaagaacaagatcagagacaggaaaaagaagcaattaagcatactgcaggtaagtcatgtaaaataaaggcaggaagtgtagcttgggtctggagatttggagagcatttatgacttcccatttccccataggccctatgaatctagtagtcctggttcttacatggggagcattcctaccagagaacatgataaatataccactcaaagctatagctgctacctggtcactttgggctccttataccagtagatgaataagcaaagaaagaagttaacatattctctgggataatgtatcctgatcatcaaggaaagttaaggctgctgctaaatcatggaaataggcagcacatatattgcaaggagagtaaagttgagcaaaggcactcctacttctgtgccttgactccctgcccatgtgttctcctatttggactgtagaaccacataatggctattggtttaaagtgtattcctcatcctaaagtatagggttccatgctatagagtgtcattttcccactagcacctcagtggcaaatttgagtccattacatatttttctattgctggcagcttctggatggtgtggtggtcataggattagtgcactccctggctatttcctctacatcacacatcctttgctgtaaagtgatctcttggcctgagtaaatattttgtagattccaatttggttgtcatatgctttgagtttttggatagtgaactggctgagacactgtaggcaggaaaggcaaacccagaccaagaatacacgttaattccggctacagtaaacataacctttccctgggtgaaagggtccttatggaatcaacttgccaccgaatggcaggttggtctccttgagagatggtctcaactttgctttctgttgcaaggaggtccaacattcatcaacagcagttactaaatcagctttgaagagatggagcctatgccgttaggtccattcatagactctgtctctatcactgtggctacactgtatgtaagaccactttctaggcattaaggtggtcaagtatagagatttgctgacatatctggcccagtcatccttggggttctgtaggattcttctgcagtggattctgtctggtaggcacaaatgtacaatagaacaatccctgcactttgtgcccactctcataggttcatccatatgcctcttacccagaccttttcatacctggtcttccaatcttgtttatttcaaggctgtaaccagtcagctaggtaagtcattagtccttatatcccagttttatgccacttttcttctttccctaactactgtttttcagtgctactctgtggtacaacagcaattcattttcatcttacacccacacactgagttgatccatccatgtactaatcttgggctttttctccctcatcaacaggtcacaggaaacccttcatgaattcataggtgtgaaataggggagaagcattataacagtgacagaaagcatgcgggtttgtgacatatgtttgtgtatctttcttataccttcttacacctgctcaagtttgaccctgggcacatcctatccatgttatggttgattgctgctggggtcacctgattttatgatttgttggatctattggtatctgtggtgtgctagtaaatgattacttctgaaaaatactgccttggcttgtagcatttggtggcttctatggcataaatatgtctactatggctgatttcaagtgccaaactgatgtcagaatgtggagttaggaagagatgtgatggtatgaactgtctctagcacatcactatcttcagctggtgagagcagttctggtcacgtggtcacttgatgtcatttgagtttccatggtttgttactcattttctactggggcccaatggtatgccaggaattgtttatcaatagttcatagtcctgtactgtagatgtcatagccttgccctggaaccctagaagtgtgcactgtataaaacacattttgctactacaattaattccagtactataggtgatgtggtgcaagcaagagtcctggaccttatgcagacccatttgttgcctggggctcctctcaaaagttacacctctttgcatcgtttggcaaatagatcataacagtagtctcaagtgtattatatgttgcacctcaacatcaaagaggtctgctgaacattgtgattctctttcaaagctaggaggcaagatagtaatttgccctttactttggaatacatatcccaggatgctcagaacactcggaccctaagatgtttacctatggggcagcctcttgaatcttcctctagaacacacgtttctttccaaagcatccagaatacttgccactttttgcacatcaggcacggttaacatgacatcctcaatatagtggaccagtgtgatgttctgcagaatgtccagatgactcaaggctgtgctgacaatgttatgacaaagagcaggagaattaacacagccctggggcaagactgtggatatacactattatctgtttatgtgaatgagaacttcttccgatccttctttctgataaaaatgaaaaagaaaacatttgccagttcagtggcgacatacttttggtgtgcttggtgactcttggttaacaggtggtccacagtttttgcaaggccaggctcggctcgtgtattaaataggaccccattagggaccaccattcctgtctccttgaagacttggagggtggcactaatttttgccatttccttgagatgctgttatgggttgaattatatccccaaaggatatattgaagtcctatcccctggtatctatgaatgtgaccttgtttagaaatagggtggatgcagatattattagttaagatgaggtcatactggaatagggtggaccctttcccagtatgactggtatctttatcagaaaagggaaatttagacacagctatagacacagagggaagacagttatgtaaatctggaggcagagattggagttatgctgccacaagtgatggattgcctgggggctaccagaagatggaagagatgaggaagaatcctccttctaagactttggagggagcatagacctgctgacaccttatttttagatttctagcctccagaactgtgaaataaacttctgttgtttaaagccacttagtttgtgtactttgttatagcagccataggaaactaatacagatgcaatatatatactatatataatatatatgaatacatatacataaatatatatactatatataatatatgcatacatatacataaatatatataatcatatatatttataaattcattatcctcgtggaagtgtcttactggcatatccaggatcattctctgggcctttgctacaacaacagctataactttacaattcaatgaacaaagggttctgccaactgctaagtatgcccatcccaattgtacatttggaaattgtgcaaaggcccacccgtacccattgtgagacagacatggtttggactccggttgctagttgacttccatatacctctactcttagcaggagggtaatgtattagtcagggttctctagaatcatatatatattatatatatgagagcttattatgtattaacttacatgatcacaaggtcccacaataggatgcctgcaagcttgaggagcaaggatagccagtctgagtctcaaaactgaagaacttggagtctgatgttcaagggcaggaagtatccagcatgggagaaagatagaggctgagaggctagaccagtctctccttttcacgtttttctgtctgttttatattcactggcagctgattagatggtgcccatccaattaagattgggtcagcctttcccagcccactgactcaaatgttaattcctttggcaacaccctcacagacacacccagggtcaatactttgtatccttcaatccgatcaagttggactcagtattaactatcacaggcaatgatggtgtttgggatctttggctatcagcatcaatctgtattcacgtgtttggaaatatctgagtaatttacggattgatcgatggtgttgcaacatctttcttgtttttcagttgatgtgttttgggtcacagaactggctcaggcctaaaagctgagcatggaaataaggcttttcactgagcatagctgacctcaaacttctactctgccgtcacgtatctcttttgaatattcatattcaaatacccttattggctgcctatctatcttgcccctagggacaaaatgttctatgagccctttccataaattctgtgggtcatgccttgctgactcattctgaacttgctgtggattatagccttctgtccaccgctcttctattgggtacatgctgccacctagcctctgctcttctcagatcctatcatctccattgctattagggaacccactaccataacaatatctcacatcattattcccaggggtccttctgaccttattgccttgggcatgtcttatgggcctccctaaggaatatggtcggtacagggttttctgtctcatagaacggacccattgcttgcatgttgcttctgtgagccttttaagcccttcctccatcatttgctacagcaattctggcatctctattttgtttactgtaggcctttccttttctcaggctttcaaagttaattgtatcagctgattacagcaatcactggggctcttgccagggcattaaatcctgtgtcactggaaagtgccactatattgcaaaacactccctaacacagctgtatagcctatcttctcttgatttaaccccctgaggaaccacttccagttcctgatggtaacatgttatccatgtcttgatgtttttaggcatataatttcttttctgctttacctgtcccaacacttttgatcaggttatgctgagattttactctaattatgaaccaagagaggaagtggagcaagtcctgagaaggtaaagaaatgttatctaagatacctgcctcacttgatacctttgtataacttcaaacgtgtgtgtgtgtgtgtagctctgtcttccaataagagataattggtcacattttcaggtgcataggactcaggataacccaagatttgagattcttaactgtgtcgatacagatatccccatccaagcatcagggccccactcccttcagggctctaagtttgtgtaagagacctgcctagactgagatccagctttctctgatgcactgctaacaattaattttgttttctcttgttcttcaaccgtggctgccatccaggtgcagaagtggaagttttatttaaatagtgcctaggagttcctgttactctcactttgctaatttactttgttgattaatagacttgaacctgtcattttctctcttcaatcactggtgctgagcagtagccaaccaattccacattcttatagttgttatttcttcatatctctaaaacacccagagtattgtcgcagctattgcaccgcttccacctgtatcccatcacaggacagcataggtgaaagccagtaaaatgcaccagcattccaaggactatcaacattccacctatcaccagcaatagggttctcattatcatccagctggaaaatgatccaactccaggatccccatctttacagtctgtctcttagaagtgcttcttgtatcagtggtcatagattgggttccattcaggttagggatccttgtttaagtcacttattggggatgtgctcaataggggagtgagggaagcagaataggatggggaaaacgccaagcaagaatgtggtctcaggagggactagcttcagtctgatcctacaggacactggagcacaaattacacaacagaactagtcgtacatagagaaaaagaggctggccttgtgtatcccatgccaggaggtcattggctgagtcaaccctggagaagggagggaaagtggtgtatccacccaggcaaagtggcttccatctggttcagggcgattctctggaataggggtgagctgtttgttgttatctccaaaagtcacagcaaatgggagatggtacaaccagaaaagggaatgtgggcaaacaccagccacattcaccacaatattacagagctattaggaactataatgatcagcatgaagtttttctgtgtcctaggtaagaaatacatttctttaaaccgtctggaaatcttctatagtcttggataagaaggttgtgtttatctttcctcctttttagtggaattatactcaatcccaaatgcccattcactatgtttaacaagggaccgtcacgcaaatagcatctctcttcctggtctgctgtcaactcttcaagtctccacatcaaaaatgttattccctactgagttaactttacttttctctctccttacctttgttcttgcatataatggttgcagtgagggattatgagaacatctcctttcagatacgttgtcacattcagaattgtgtgatctagcatgagaaaggcttaacctttttcctttccatgtgccagtgaaaatttctttatactaatacacgttatttctgaaaaggggatgagagaaagggacaagagaagggatgatacaaaagtaatgtagaagtggccaagaataagatttggctttcctatttttttagtttgagtttggaaatttatgcattctttttgtttgtttttgatccagtaaaaaaagtgtcacctctcgtcaggacttcaatagttctgaagggtctggaagtaagtcattgtctcctgagttgatttaaggcagtttatgatgagagtcattctgttttttattccctaaaactctgagcatactgctgagtgaatagtctgtgctccacaactacttgaaaaatggtgatgcaggccaaagtgttttgaaaactgtaaaaatccatgcggaaatgaggtaatatgattgctttaaattgacctctccaaaggctctttcaccttttacctgttttacctgttttaccccatatatagatcccaatgttcttcctcctacttgatgcagaatgcctgtttcattttctcctttttagccataaaaattccaagtataattctagggcttggtttgaatcccactgtgaggaaacaaatcccgatactctaaggtttggcaatggaggatgaatatccctttagggaaaacgatggctgaaacctgtgggtttcactcgtgtctactgagattctcctaagggaccttcttttcttaggacagtgttttcaaagtgtagtccgcacgtcagaatattagcattactagagaacttgttaaaaatgaaaatgattagctctaccccagacctattaaattttgaaccctgattgtaggaccctgcagttcatgtttcagtaagccttccaggtgattgtgaggcccgctaaagtttgagaaccattgtcctagggaatcacttactgatcacttttgataccaccccattagcttcaggaagtcctcctcaacttagcactttacaccaaattaacccttaattgttgtggcacagtcaaaacatttaaactagctttcctacctaatgccttctccatcataaaaagaaagtgaattcctaacattaatgtataattaggccaggcgcgatggctcatgcctgtaatcccagcactttgggaggctgaggtgggtggatcacctgaggtcaggagtttgagatcagcgtggtcaacatgctgaatccccatctctactgaaaaaatacaaaaattagccaggcatggtggtgtgtgcctgtaatcccagctgctctggtggctgaggagggaaaattgcttgaacccagagatggaggtttcagtgagccaagatcatgccattgcactccaacctgggtcacaagagcaaaacttggtctcaaaaaaataaaaatataaaaataaaaataaacccaccagttttatagtcaggcaaactacactttgactcctgcttttcactcaaccacgttgataggaaggctctgcatctgttaaatgatggtaatagtaatatctaccttttaagactatggtggaaattaagtgagttggtgaatggaaagcacttagcaaaacgtctgactcataggtggttttcagtaaatgataacaaatcataatttagcttagtcatcatcatttcatagccccctatctgcagtgggtctcagagactagctctcaggccacctccaccgggcatggaacattttttacctttggaatttagaggcaaccctaagcatgtcttgggcccttagggtgtaagccaagagagaagcaggaattctcttctgtgtctaacttccactgtccaaattctaacttccactgtcttaagacccttctgtcacctaggatattgtttttgggaaacatcaggcccattcccaacatttacagggactgaagcaggagtacaaatggaaggcccacacatcatatatgtatttataatttacagagcaagctgaaaatgttttatactctgggtaggcaggatatcagcccacacaatcccaggaagctgtgactatgttacattatgagataaagggactttgcagatgtgattaagttcagggcttgagatggggtggtgatcctagataatctagtccgatgaaatcacaagggtctttataagaaggaggcaggagagtcagagaaggagatgtaacaaaggaagccaaaattggagttgtgcaaatccatgagtgaggtagtgggcagtctctagaagctgtgaaaaagcaagaaaagggattcttcccttgatccccagtgggagtgccttgctggcccattttagactgctgaccttcagaactgctccttaatatatttgtgttgttttaagtcataaagttgcagcaattagttactacagtgataagaaactaataaacctcctaccttcataacagtacaatttttaaaaaatgtgtacatatgtttttataagactgaaagttggcaaaatatcaatggtgattgaatttgattattattttgcataacaaatggtctttgaatgactcaataatatttgggtgaataataaaataaagaataaaataaagatacaatttattattattattttctgtttaagatggagtctcgctctgttgcctaggctggagtgtagtggcatgatcttggctcactgcaatctccatctcccaggttcaagtgattctcttgcctcagcctcccaggtagctgggattacagacatgccaccacacccagcttatttttgtatttttagtagatacggggtttcatcatgttggccaggctggtctcgaactcctgacctcaaatgatccacctgccttggcctcccaaaaagctaggattacagctgtgagccactgtgcctggcctcattaattatttttatctcataacacttatttttctttcctgtatttcagcacaatcatgagttatatggttcagagaacttgtttcttatacacagtattgccaaactaggccaccatacttgaattactgtagttcctagctaatatttttaaattattttcagtctggagaaacttggttctactgaggcagtagcaacctaattgtcattaaaactcttaaagaatactggattaagaaatagattattaagttatatatcacgttcatgcattataaggggattgtctatgatgcatgatctcatcatgatcttatcatgatctcagaaaaaaattaccaagtatttaacttaagcaagtgattactgttatgtatattttgcttttcaacacctacaaatcaatatctagatgcctagagttttacttaagtttcttttttcccccaatcttttcaatggtgaaatattagaagaaaattttaaaaacagaagtatgatgcttaatttgatcagttctctcactacatttgatactatttctaaataagaatgaccagtctgcaggttctcatttgtttgtgcatgaattcctttgtgttcatataaatattttctatttcctttttctaatttttaaatattttattgttgcatctcacatgtagtttatttcaatttagaaaaaagtgttcaaaatatttgcaaagactttgtattttttttaaaatgaagtagccaaacctagattgttagtgtttttataaacttctgccatataataagtggcaagcaacaattcatactgcatcaatttgtgattctcttgagaatcgcaaacaagaacacagagacataagaaaacagacgcttggcacttgtggaaaatggtgtgttattatacaagaatcttctgctttagttctgtcagagagggcagaattgagtaaatactttgtcttttcttttaccaaaatccttccctgtaccctggagccctgtccgtccatccatctcagatgttagtttcagcacagtcccgtaaaccttcaggcactgacacataaagaccttttgttctgaggactgggaagagagatgtagaaaagtgtttccctagggcgtggacagtttatactacatccactaaagtcaagtgcagttctgagggaacccttttatgggattttgcattctctacccatagaaatgtgtctttctcctcttattggaaaaacaacaacaaaagcatagaaatagtaatagaactcaccgcaacagcataatgcaccaagtggcacatgtgtgcacactgacactcacacaagtgaaaaactgaagcaagtcgcccaaatttgcatgggtaacagatttgggattcgagcccatgtctacttcacattgagttcattctggtacgtcatcttgcttcctcaagagcagggtgttatcctttctctggtttatctagcagcttacctgtatttgtcactcaaaactgactcacatttcacctcctggggaaggtgccccaattcccttttgaactttctacagtaacatgctcttcagtcatttatagggttacgtgctgttctcacgctggcctctgattctttgaggacaaggactgtgttttactgctttctgcatttctgaggcctaagagagcgcctggaatatattaggagctgaaatatgggataataagaaagctcttaattttaaaaaagaaatatgctaccactataattcagcatattaagcaataagtatggacatgaaatccagaagtcacataaattcatctttaggtcccagattgatagctgctgggatatttttagagaattttgaaaagattccacagttttcttcagcaatttattcaaatatgggccattctatactgtcagcaaattctctctgatatttaacctgaagcagtaacctataaatggtatgctgaggctctgagagagctggtataattgccaaagttgcagtcttactactgggatatatttaaggtttgggaaagtcttaattcagcacattttgaagagcagtatttttagttccttgggtgaatggtcctgttttaattcaggaaacaaaaggtgctggtttagctaacagtttgatttcaatctctgaagcctttccaccaattattttctttttcaagcaaaatcaatctttcctccatgttctcaagtccaatttatttaaaacacacacgtacatgtctgcaggcacacatacatacacacacatagtattacagtacaactattatatactgttttagatgtagatatagaaagaagtatagatatagattgcggtttcttgagtttctaagagtttccttattgtttgcttctccagtgactttgcaataacctagcaaacttccagtaaatgttcgcgaaatacgtgaatagtaaatgagagaaatgaggtggagcttgaaataatcctgccacctttgttcctatcactgtaaatgttatgtatacctgtctcttttcgtagaaagtcttgcacatatgtacccggagaagagacagtcattggtgtgattgctgtcttagagggtatgctcagcttgaactttaccaggaaacaacaaattatttttgaaagtgattgaaaatttatactcctaccagccatgtataaaggttcctatttatctgtgtactctctgatctttgatattgtcagacttaatttttgccaatctagtaggtatgtacaggtatctcattgtgactttactgaagactggacaattttcagatatttatttgctctttatttttttattttctgtgacatctctgtttagcttttttgttctcttttgtttttcttctttattactgatttgcaggcatttttacatttatgtaaatactaatattttgtctcaggctggcttgtctttttaccctctttctggtgcttcttggtggataacattcttcattttgatgtagttgaatttcatcacccttttattttatatggtcaatgctttgtgcttaaaaaatcctttcctaccccaactttataaatatcttttcctatattttctctaaaagttttaaggttcgccaccattcgttgactgatctttctctcagtaatttccaatgccatgtctgttacacagcaagctatcatttatgcaggggtctgattctgggctctctatttgtttggcctgtgtgtctgtccctgagcctaattagtaatttatatcagtaaggcattttctcctactctgtcactcttcagaaatggtgagttcttcctgctcctgtactcatcatgtaaattttaaaatcactggttaaattttatgaaaacctgttataactttcattgtaattgtattgaatttagaaagccatttctggaaattggcatttttttggtattgtgtcttcctatctattaacattctgtatttcttgatttatttaggtctgtcaaagtctttagaaaatatttataattattattcttaggtcttgctcctctttgttacattacttcacttttgctactattgtaactagtatattttaaaaatatatattttcaatctgtggctgatcatggaaataaaattagattttatattttgacattacaaccagctgtttgttattgattattatgcataataacttgtcttgagaatcttttgtgttttacataaaaatccattttctgcaaatattaacactgtgtttcttcccttctaatctttactcctttaatttttttcttgtaattgtattgggtgtttagtacagtgctgaaaagaagtgctattatagtcatgctcgtcttgtttcatattgtacagggaattgcaatcagattatgtctgttgtaggctttttatagatgcatttgattaggttatgggcgctttttgcgttcttagctttataagatttttaaaaatatgcttgtgttggattttttttaaattatatttttccctgcacttattgagatggtttttttaaaaaatttattgatatggtgataaatatattttctaatgataaactgccttttccttcctaaaataagctcaacttggtcaagatatattattatggttttaaatttatatttggaaagtttgcctatattttatttaatttttttgcatctagtttcataagtgaagttgactgatatttttttcccacattgtggtattttaaaaagtatcaatgatatggtaggctcttagagtgacttgaagattgtgccctctttttatcttttggggaagagtttaaaatttataaataatgtggtaggattcacctatacaatatctgggtctgatattttcttcatgggaagattttttaaaactgtgattcgtttttaacctatttaaagcctactctttattcttaatactgttttaatgttatgttttttctaataatgtgtccattttgactaagttttttagtatgttggtataatgtgatacacacacacacacacgcgcgcgcgcgcgcgcacacacatacacacacgcaaaataccatagtgttaccttatctttttaacctgttttatctgcagttgtatatctgcagtaatctgcagttttgtatctgtagttatgacttatatagttatatttaaaacttcttttgaaacaaatgttcgtaactgcatatcagaaaagtattacagaaggtatttaatcatttaaatttgagtgtgttctgtgcttcccagatgcagaaataaaatattttcttttgttttattttccaacacaagagggcagcattgctgcactgttaatttcctgtaggctaacaccgctgtgccttgtgtaggtttaaatatacagcacatctctttcaaatggataatcatttgaggattgcataaatgtggaccttgtctatttttcacttacatgacattcattgaaatttagttttgaaaacaatactctctgattagcatttatacatgttttatatttgcttcattgtttctgattctgtaacaatcacctcattctgagaagactaggtactgttgtgtttgatagtgtgtatgtatggtaattttctagaaatctgaatttttttaaatgggcttttcaatgatattactgagaaataggtagggtactattttgacataaaggataaagaacccacaaagtccatgagcttcctgtcggatatgagagattaaaactgctgctgactacaccaccaggtccatgtcaattaactcatttgcagatgggaggtgagagtgcaaaaataatattaacattaatattaagtaccattactggctactcattatagcttagattctttatttgctctacttagatttatttttataacatcatcctgtaaagtaggtattattacccccatttttacagatgaggaggcagaagcttgggttggctaactcaccccttagttcatgagggtcagaagagggtgctgattaataaatccccaggctttctcactactgcacactgcctcaccatcaacagcaaaacaggttgaattcgacgattcagtaaaaaagtaattttgatagttgagttcctttatcccttaccacgtctatttcacatatatgattattattattttggtagagatgaggtctttttatgttgttcaggctggtctcaaactcctgggctcaagcaattctcttcctcctgagcctcctaaactgcagggattacgggcatgagccacgtgcctggctcacatatttgatttggtctaggctatcttaacaaaatacaaaatgctttgtaaagtctacattttattattgcatttgctatttttagctctttatgtctgagcaattgtttaatgcctgtgcctgagaatctttttctcaacaggggaactgcgggggagattccagaagttccttttagagttgttgtttcactgtatcagtgcatcggtgactgagaaggaagtatttgcttttgtgtggcagcgcagtaaattcgcagaacacagttccaagaagcccaaggcactagcaagaatgataggtcaccatctccattatctgtcggtggtggatatggaagatagcattctatattaacttttgagaaagagaaagttaggcaagaagagattgctgaaatagattgtctgtgattgctgaggttgaaagttttttattcttggccaaggaatgtatcttttgggtttaacatcactttaggagtcagacagccttgaatgttagactgagctttgcattttttaggtcatgactttaggcagattccctgagcctcagattcatcatctgtgaaagaaagataagactaataccaatttatccaggctaaaaatatatataaaaatatattttttcaaacatacacattcaaaaataatgaccatatttttaaatgctatcctacgttgtgtcaagggcaccagtttctaacttagagacatttgcaattttgagcagtgtcttctgaggccactgggtatctctagaaagcttgaagtttaggagtaaacagaaaaaagcttgtgaacatgctttataaactgtaaagatttgtaaatatataaaatcattataatggctcctctctctgaactcaacttccactggatacatggcatatacttttgcatgtatcaacttagctcaaatcaataaaaaacatttttggactcctggtaagtccaaacatttattcattaaaaaaattattagggacctaaatgtacactgttttaggcactggagattggacaagaaacaaaacagatgaaacctttgcccgtggagcttgtatttgtagaggtgacatatgtggatcacacataggtaggatgtttcataataatatagagaaaaataaagtctaggcaaatggctagagaatggtggaggcttgctactttagatggaattgtccaaaagccttctttgaagagggaaaaaactgagcaaagacttgaatgaaagaaagaaaccagccatacatctgtctagaaaaactgagttattggcagagagaacaaaaagtcaaaggccttgaaatgaggatgtgtgcctggtatgtttgcaaaatggcaggaaagctatggtaaaccatacaaattattgggttttccatgtaatccattgtctctttgagagacgatatctattataatattataattttatagctcctcttttataggtgttcataataagaataaagataataattagtactttttgagtacttgccatgtgctatatttgtccttacaaccctcccaaataaatataattatccaccattatacagagactctaaatagctttcctaaggtagcatattcaataagttggtgaggcaacggtttgtcttatttcaagtgcagggtgcataataactcaatgggaagacagatgagtgaaaaatgcgtagtaatgtcagagggcttatgaaaggtacctagggaaggtgtcatgaagttacttagggaaggtgtcatgttatgccatagaggatcagttccttaaggaaggagaagatggattgggagtggagagagaatttcctgcgagaaacaaaggcatgaaggcttgaaagagcatggggtacatacgcagtaaataacaaacagttaagtgcggctgaagagtctgtagcatgcgatttaacacagatgcttctccacttataatgagattacaacctgataaacccattataagttgaaaatattgttagtcgaaaatgcacttaatatacgtaacccacagagcatcatagcttagcccagcttaccttacatgtgcttagaacatttactttagcctacggttgggcaaaatcatctaccacaaagcctattttataataaagtattgaatatctcatgtaattgattgaatactgcactgaagtgaaaaacagaataattgtatgggtactcaaagtaaggtttctacagaatgtgcatccctttcacaacttcctaaggtcaaaaaggggtcagttgaaccattgtaagttggggaccatctgcagacatgctcaggtgctactttgccaggcagggtctgctactgtaacataagacacctcccagccatggctgattggacagaggtggaactctgacccacaggtagcagaatccactgttttactagggacataggatgtgtgtggcttgactcaagcagctgaggtgactgaatcagattctgactttcaaaacattgaagcaaggatgcagaaactgttgctagtccatgaagggccctgggatagggagattatccaaatttgggtggctcaagaggtcattgggccatgggaaagctgattaggaagctatctacagaaagagaaaaatggaacaagtacagagagaagcaaagatggaatattatgaaacctcggagagaaatggagagcagcagatcctcagtttctgttgcatttccagttctttaggcctcacgaggcaggtctatgtcctgtcctagatcccagagatctttctatcccaaaattaggggggccatgtaatttagatccaaaatggcactcttttgaaagtgaaagtggctgctattaataattacagacgaaaacctccaaatcactgggaaaactgggttgtatgtggtggtgggctaggaagtatttaacaactgggtccccaggaaacaacagcaacaacaagccagaatttgattggtagtgtttgtcgatttccatgttgtaaatactctcaccatagctgatttccagctaccaactggcttggaaaattcctgaaaatttaataatcacctttctcaagatgcgacaagtcagctcccgtacaccactggatgcatactgccttacctaaagtactctccttctatactaaccccctgcccccacctttatttttacttgggttttgtgagtttatttgaaccttgcaactccaaaagcaccgattagaacagtagtgcgtttggccctgcgactgcaggcagtgggaggcctgcctacaagcctgccctccagctccttgaagagagagactattttaaacttccctttcctccccagcatgcccagcacagcgaggagaatgtcgcagctgtcagtaaatgcctactgcattaatgcttgaggtgtccctcattgcacccctgcagcaaggttggccagctgtgatttacaatttgcctgtcagcagtgggaaagtaactttgtgacagcagcaaacaccagcttctcagaggattttgagacctgggttctgacatttttacctagatgtgattgttgtcagcttatcatcccctgtcaagttctaggcttccttgagcagaaaatgaagtttattaactcagttatgggatgctctgactctttagccacatgggtgctaactgcttgatcagtgcctctccttagtgtgttcacattggcctgaggcgagccctgtcacactcattcttccttcttcaaataacacaatcattgccttccaaaaagcagaatcatccatcctgttttagaaacaaactggttacccaaactaattagctgagcttggactgtacaaatacctttttacctggaatccaggtttttctttacattttcctctcttttatccctatttatgcttgtatgtaaaaatctttatacatttgcagaaactggtaaattatcagaagaatttggtttctgtcagctttcctaaaagcaattattttccctgtttctgagaagtgataagaataaaaaatatttcctctgaactttctgaatatattattgttaaatgattgatataacacttacactgagaaaaaaatttattccaggtcaggcacatgggtgagctgacacacacatatactttcttctctagcagttctcgggtgaaagagaatcaggtgaaatgagaattctatgcttgtactaatactgtcttttaaagttgtttatttacaaaagtcttcccaggttacatgccaagcaataaaacggttaaacaattaaaaggtttccaagacaacttattgcaaagtaccataaaaagtcagctatgatatcacacttgtaattgaagactctaagtctcagctttcagtaagcatgcattagtatcaagaaggtcaagattcatggattctggtatttttggttatggcaagagaaattaacttttataaaccatagtgtgaaaatcaattcaccagaaaactctgtgtgtttacaatgtgtccattaatgtcctggctaatgtaaaatgatgaggacatgagtctaagtaatagatgttcataaagtggaatatatagagatgtttctagagcattatttaaattttgaaaaagaataacaattctacatctccagtaagtgagcatgatttaatttggacagatagtgaactgctatctgaccatttaaaaccatgttgtagaagaatatttgctgctgtgaaaagatattcagaatatattgctaagtggtgaattcagctacaaaacactataataacaatttttgcatattgtgtatgtgcatgtgtgtgtgtgtattacatataggactagaaaaatataataatttaacagtggttatacccagtggatatatctggggagagtgattaagtcatattgctctatttgcctatttgcatttttcactgtgctgtttttactgttgaagcacgctcggctgttttagttacaggagaacttattctcatgagtgtactgaattttgaaggggatagaatcttacacaattaactaaaatgagacatatatatgtgccaaatgtatggtgtagggtcctgtaattcattacattcctgcccttttatttagggacaggttttagaaaggtgagtgggggtaacctagaggagtgaaaacaccttgggtaacatgaattgatgcctgcttaaagagttaaggcatttcctcccccccccatggaaaaggagaacaaagcttttactgtacgattaattagaattcagctttgcatagtctgtggttacaaacttcagtgaaattggtgcaggatcctattctcaaagggttacaaagcacatattgttgtcaaagtacccagtacagaaagatagcatcctcagaataaaaattaagtacattttatatgaagcgatacacattagacactttcataggtttaaatattaaacagtggtgaacagttccaggaatcttgtgatttttttttttttcataaaatgaatgcccttatttcccagaaatccaagacttaacatttcttaacagcttatctgatgggaacaaacccaaactggcatgtaaatattatcaaccaggagggtttccaattaatagatcaaggtaaaacaaaaattacattttattcaacttttgccactagtgcttagcacagtgcatagcgtattattggcactcaacaaaaacatgcatatttttctttaagactgttgaataaacagaaccaacgacaaaaatcacgtgattatctcaatagatgcagaaaaggcctgcaacaaaattcaacaccccttcatgctaaaagctctcagtaaactacgtattgatggaacatatctcaaaataatgaaagctatttatgacaaacccacatccagtatcatactgaatgggtaaaagctacaagcattcccttttaaaactagcacaaggaaaggatgccctctctcaccactcttattcaacatagtattggaagttctggccagggcaatcaggcaagagaaagaaataaagggtattcaaataggaagagaggaagtcaaattgtctctgtctgcagatgacatgattgtatatttagaaaaccccatcatctcaggccaaaatctccttaagctgataagcaacttcagcaaagtctcaggatataaaatcaatgtgcaaaaatcacaagcattcctatacaccaataatagacaaacagagagccaaatcatgagtgaactcccattcacaattgctacaaagagaataaaatacataagaatacaacttacaaggtatgtgaaggacctcttcaagaagaattacaaaccactgctcaaggaaataagaggggacaaaaacaaaaggaaaaacattccgtcctcatggatagaagaatcaatatcatgaaaatggccatactgaccaaagtaatttacagattcaatgctattcccatcaagctaccagtgactttcctcacagaattagaaaaaattactttaaattttacatggaaccaaaaaagagctcgtatagccaagacaatcctaagcaaaaagaacaaagctggaggcatcacgctacctgacttcaaactatactacaaggttacagtaaccaaaacagcatgatactggtaccaaaacagatatatagaccaatggaatagaacagaggcctcagaaataatgccataatccgatctttgacaaatctgacaaaaacaaacgatggggaaaagattccctatttaataaatggtgttgggaaaacaggctagccatatggagaaagctgaaactggatcccttccttaaaccttatataaaaattaactcaagatggattaaagacttaaacataagatctaaaaccataaaaaccctagaagaaaacctaggcaataccattcaggacataggcatgggcaaagacttcatgactaaaacaccaaaagcaatggcaacaaaagccaaaattgacaaatgggatctaattaaactaaagagcttctgcacagcaaaagaaactatcatcagtgtgaacaggcaacctacagaatgggagaaaatttttgcaatctatccatctgacaaaaggctaatatccagaatctacaaagaacttaaacaaatttacaagaaaaaaaacaatcccatcaaaaagtaggtgaaggatatgaacagacacttctcaaaagaagacatttatacagccaacacgcatatgaaaaagagctcatcatcactggtcattagagcaatgcaaatcaaaaccacaatgagataccatctcacaccagttagaatggcaatcattaaaaagtcaggaaacagcaagttgctggagaggatgtggagaaataggaatgcttttacactgttggtgagagtgtaaattagttcaaccattgtggaagacagtgtagcaattcctcaaggatctagaactagaaataccatctgaaccagcaatacccaaaggattataaatcattctactataaagacacatgcacacgtatgtttattgcagcactgttcacaatagcaaagacttgaaaccaacccaaatgcccatcagtgatagattggataaagaaaatgtggctcatatacaccatggaatactacgcagccataaaaaaggatgagttcatgtcctttgcaggtacatggatgaagctggaaaccatcattctcagcaaacaaacacaggaacagaaaaccaaacactgcatgttctcactcataagtgggagttgaacgatgaaaacacatggacacagggaggggaacatcacacaccagggcctttcgaggggtgaggggctgggggagagataacattaggagaaatactaatgtagataatgggttgatgggtgcaacaaaccaccatggcatgtgtatacctatgtaacaaacctgcatgttctgaacatgtatcctagaacttaaagtataatttaaaaaaagaaaaaaaatgcatacttgattgagctagaaaatgtgcttgtctggaggtctctaatctgtgttgctaatacatagaatgacataatagaaagactatggaccgagaaaccaatactcagaccagctgcgattgagttctaacgccagctcttctgttaactcagtgtatgggttcttctccttgtggctccatttacccatttgttaaaaagaggattggactagattaactctaatgagagtatctttcagatcagaatacctaagggtttcttttctttctctattgccaaagctcatgtatttattaatgtattccacagatgcttattgaatgtcttctctgtatgtcaggcattgtgctatgtcatgcagaacaggcctgtaaacaaggcacacacagtccctggccttggggtcccttcctccagtgagaaagttgtgttccctcctactgggttgactataattttttttttaattcactcattgtttaaagcaagatcttagaggaatgggaagttattcttattgggagaattgcttgtcatcatagagttctctttgatgagatagagaaatttagaaagattaaactcctaaattgcatttccttgtgaattgttgtaatggaccagaataaacacaaatttggtgttttctagcattttagtgacagtgtgggtacacctcacattacaatgtaaatccattttaaaaatgcagttagtaacttatgttttattaactctcgtatttttagagtaccagagtaaactgaccgtttgaaggaatgcttcatatagtgagtcatattgtcatgtaattatgacccaacctatatttttatttcattaaaggacttttcttaatgcaaagcatctttaaacttccatgtaaaggagataattatattaaaatattcataaccacattttgacacagcattgctcgttttgttcctttgatctaatagtttgtagaaaatagaatgtaacaaattatctcatttaattttacctgagaaacaccgtactttttcagggtgtataagtcaggataagctggctatgatgctataacaaacaactccaaactctcagaggtttaaaacactataggttttcttcttgctcatatgacacattcatcttgggtatggatgaattggactgatcacaattactctggaacccaggctgacagccgccaccatctcaaacattttcatggtaagtgcaagagagcaaaaagagctctgagagggtctcactttggcaaagaattgtgtggttatatccagttataaatcactggctagaattagtcacatgctccatattttcacagaggggcaggaagtactatcctaccatctgcctaggaagaagacagctgggacacttgatgaataatgctaattactaccaaacacggtatggaagagttgttttcaggcattagctcccttaatttgctagagaatcaattaacacttggttagcttagcaatgtatttagttgaaaaaacttttttctgaatatttcaaagcactaacttttttgagaagatctactgcattgtactacatattgctggaattctagcaacatcttcaaattttagatttgtgacaatatttgtaatgatatgtattttatacttttgcccatggatattaatgacatttttactgtgattctcaaaagcattaaaaaagaagaaaggttaggtcatataaatggtatgattagttttgtttctttatttctttttcccttggtgtttttttagacgcagagttttgctttgaattgctcttccagtattattttgagagtgctctactagtgcttactcattttccattctaataacaattctaagccagaacaaataggaatttatcagaaaattatggtccactctcaactacttctaaatatcaatctcaaaagttcatttaataattcaactttcttaggtatagtaataaacaatgtataagtgccttttaatatacatcttaaagtattatttttatatttattaatacttgtattcatttataaatttacttatttaacaaacttttattgtactcatgtagcaggcattcaaactgatttagtggtttaaaatatatttaattgtatactaagaatttatgagaatttacaaatattttctttttttttttttctaagtaagtttgttgtgctttaaaggttgtacggttctattcttccatatgaaactgacaatacaaacctaaaaatgggaaatacattttggactacatgtccagaggcaggggctagactaccttctttcctatggctttttgcagaagaatgatacatgtatttggaagataaatggcagggaggtattagtgtaatatattgctgtcaaatattctgggattcatactttattcacttaaccagccaaaagtgactatgtgtttacagtgggtcttatgatttggtaaggacttaaaatataaagattaagacatgagccatattctcatggagttcacactcaactgggggaaatagatatgccaatatacaattaacaagtatataatgtaataagttctatggtaaaggtatctactgagcacaatggaaataccaaccaacctggaggcatcagtgagatcttccaagaatggaagtgacattcgattaggtcttggggtgaaatacactggggaagaaaggaaggagaacattgcatctataacaagcaatgcatgtataacaagcagcatgagtgactaaatgagtgaacatgtgaaaaaatgtgcacctggaggactccatacatgaggtgtgcggtgcagtagcaggaaatgaggccaaaggaaaacccgggtctggacaggacgggatcttggcttgagtttgcctcaaataagaaaggataggctaaaggataagagaggagaggctaaagagcttctggagaggcattaactaaagggattggaatttatctagtaggcatctgggatcattgaattgtataaagcaagagtgacatggtcaggctgttatattcaggaaaataagtaattgtagtgagagacagagaggaataaattagagacagtgaagcctggaggcacaaaaacttacatcttggcttcatcagcttaatttgccagtgactagacgctaggcaattgagataggtgactaatttttgtactttaatttataatattatgactatgtgcttagaaaatgacacctggtcctttaataacttgattgctttttctatataaaacatctccattaaattttctttgaagtaccaatgcattttctagaaagcagaagacatgttaatagcagcgattgcctttctctgctatgaacatctatgtggtactaagtagttatttaggcatctctattaatagacagtaataggtatgctggggagatttctaagggaatcatttcatgaagcaccttatatgactttaataaaaaacccattaatgaataaaggaataagttgatcaagtcacacatttgtagccaccagcatagtttggagaatgatatgtagtggaagtgaaatgaaaatgctgagagtgatatttattccaactatttccgaagtagaatatgatagtccctgaaaatattcagagaggatggtgttatcagcagtatgagctgtttttgagaaatcgagaatgtaaatgagggagaatgattcatgccaaaattgactaactccaagtaatcatctctagaatgcttaagtaggtattttgctatattcctgtagctataacaatatatcatttgaaagattttcagaaatgagcatcattatcaataatgaaaaaagtaggtcataatctctttttcctttggacttttaaatgccaagtcttgtatcttatgaatataaaatccattatctgtgttaccaagatatatccatcattattgcttctctctgttttgaaataacatcatttttcctaggcagactaggtagattctggtataaaaaatttggtaatatattatgactgtgcatttattggattttatgtttattttaaacttatatgttttgatttttaagtttctaaacatttaggtcccttgcactttcgcatagaagtgtgttttaatgcatatgccttgtggtcagatagccagttgttttgggaatcagtttgccatttagacactcagtcccccaaaaggccgggagaatattccttcaaatggcccactgggcaaatgtgtacacttctttatcttgccatattttggagaggatatttttttgtcaattgggattatgcatttgttagagcctgtgagttcttgggagatccgtgtatcttagctttttgagttttagaattttttctcggtataacattttaaaggttagattatttgggaagaggtgtgataaagctgaatatattcctgtggaagaaacaatttgtaatctggattagctttctttgacggaaagtagttttggccaaaaggtgacaatattcttcaactggtaagtgtggaattggatgagagacacaatcaatctgaaggtgtatgctgtttaccaaaaagtagactagaaatggaggaaaatgaggaattaaattctatctaatatactctgattcacttagtgtttctgcataactatttctggacattattttcaattttttcctttatttagatgcagttccactgtaactagtcttactacaagcaagccttttcagtaaagagaggagaaaatatactctactgttttttatttctttggaatcaaatgtttgttgaatgctacattgggccatgcatagagttgaacatgacaaattgttgctaaagaaaattctagactggtgaataatttgtcttgaatgttttttgattgcatttaggtaaagttgttggagcaaagtgttctgttggctgcaaatctatccattctgtttgtttcagaaaaacccagggctagccagctttgagcattagttaattgacaatattaggaaaaaaaatcagctccagaaccatttccattgattgggaagacacacagaattattccttaaagtggtcccatttccatagaaggaaactgaaggtaaatgagtgacagaattgcttcaacccacagataattatgaatgaatgtagatttactaatgtaggtactcaaactcagtgactatgtttatattgatatataaaatatatatttatctttatgattttatgtataaaataatatatactgtattttatagagtaactgatttttagaagagacattttggttggagaaagatgtttagagtgagacagctgggtttgaataaaacttcagtacttagtatttttcagctttgaatctcagaacaagagtttctttgaatgtacaatgggagatgaaagtacatatcatgcaaagttgttactatatttgcaaacttggacacaatagacacctaggaattggtagttattatccttttgctactaatttatgtttaacaaatattccagcgctattgtgatcagaagactgcaggaaggtattgtgggaaaaacactaaaaggaacaacacaagatctctctctttaaaggactttgatacagtttttgaagagacagacacattcatacatccaataaatcttaaagaattctaatctaaagcatacaaaacaatgcaaaaccattataggacataaatgtagcactgggtttttttttttcttttttctcttgagacagtcttgccctgtcacccaagctggaaagcaatggcacgatgccggctcactgtaacgtccacctcctgggttcaaacaattcccctgcctcagcctcccgagtagctgggactgcaggtgcatgccaccatgcccagctaatttttggatttttagtagagatggagttttgccatgttgatcaggctggtcttgagcttctgacctcaggtggtctgcctgcctcagcctcccaaagtgctggaattacaggtgtgagccactatacctggcctggaataatttttatgtcaccaagatggaaattttagatcacggttgccctcttttccaatttctacttagagatttcctccttacatgtggcgataataaagtacttttaataaactaaaaaatgttcttaaaaaccattatcaataattatgatgtgatcaatgacaataaatagactatttgtaattatcatggattgcttcaacctgattctatattaaggtctcattgttatttctaataaactactgattgctaaagctgcatttttaagttggctcattatataggaaatattcagatgttaacataactataggtgctcatagttgatcactctacaatgcttgggtgttgccattcccttctccctgggtcatggcagacattacctattaatcaaggcatctttgtttctattcattgcagtctcacaaaccttctcatgtcagtgtgatatggtttagatttgtgtccctgcccaaatctcatattgaattggaggagggatctggtgggaggtgaatgaatcatgggggtggaatttcccttggtgttcttgtgatagtgggtgaactctcacaagatctgatggtttaaagtgtgtggcacttcccccttgctctctttctcttctgcttcaccatagtatgatgcgcttgcttccctttcaccttccatcatgactgtaagtttcctgaggcctcctagccatgcttcctgtacatcctgtgaactgtcagtcaattatacctctttttttcataaattacccagtctcaagtagttgtttatagcagcataagaacagactaatacagaaatttgatactgggggagtggggcactcttataaagacagctgaaaatgtggaagcaacttttgtaactgggtaatgctcaaaggttggaacagtttggaggactcagaataagacaggaagatgtgggaaagtgttgaacttcctagagacttgttgaatggttttgaccaaaatgctgatagtgatatggacaatgaagtctaggctgaggtgatcttagatggaaatgagaaacttattcagaactggagtaaagttgactcttgctatgttttagcaaagagactggtggcattttgcacctgccctagagatctgtggaactttgaacttgagagatgatttaggctatctggtggaagaaacttctaagcagcaaagcattcaggatgtaacctggctgtttctaaaagtgtatgctcatatgcatgggcaaagagattatctgaaactggaacttatatttaaaagggaagtagagtgtaaaagttcagaaaatttgcagcctggccatgtggtagaaaagaaaaacccattttctgggtagaaattcaagcctacttcagaaatttgcataaggaaagaggagctgaatgataatagccaagacaatggggaaaatgtttccagggcatttcagggaccttcactgcagctcccattacaggcccagaggtgtaggagggaaaaatggttttgtggacctggcccagggccctgttgctgtctgtagccttggaacaaggcaccttgcatcccagacactccagctccagctgtggctaaaaggagccagggtacagctcaggccattgcttcagggggagtaagccccaagccttggtggcttccatctggtgttgggcttgcaggtgcacagaagacaggagttgaggattggaaacctccacctagatttcagaggatgtatgaaaacatctggatgtcaaggtagaagtctgcttcaggggtggagccctcctggagaacctctactagggtagtgtggaggggaactgtggggttgaagctcccacacagagtccccactgagacactgcccagtggagctgtgagaagaggaccactgtcctccagaccccagaatggtagatccatcgacagcttgcaccatgtgcctggaaaagcctcaggtactcaatgccagcctgtgaaagcagatgtaggggctgtatgcagtaaagccacagtggcagagctgcccaaggccttgggagcccaccccttgaatcagcatgccctggatgagagacatggagtctaaggacattattttgcagctttaagatttaatgaccaccctgctggatttcagactggcacggtgcctgtagcccctttggtttggctgctttcttccttttggaatgggagcatttacataattcctgtaccctcattttattttggaagtaattaacttgtgtttgattttacaggcttataggcagaaggggcttgccttgtctcagattagactttggacttggacttttgagttaatgctggaatgagttaagactctgtgggactgttggggaggcatgattggttttgaaatgtgagaaggtcatgagatttgggagggtccagggatggaatgatatggtttgggtttgtgtccccaaccaaatctcatgtcaaattggaggcgggacctggtgagaggtgattagattatgggggcagatttccccttggtgttcttgtgatagtgagtgagttctcataagatctgatgatttaaaagtgtgtggcacttcctgcttatctctctgtctctcctgcccacttgtggtaagacgtgcttgcttcccatttaccttccatcatgatttaagtttcctgaggcttcctagcaatgcttcttgtacagcctgcagaactgtgagtcaattaaatctcttttcttcataaattactcagtcttaggtagttctttatagcagtgtgagaatggactaacagagtgtttcaggtagtcacagccaactagtttgacttgacacatgtgataggatctatttttcatcccatcataagcatttttgagtttgagaaagttcacactcactatgttaactgaagctaccttgtagccctgtaaatctatttttaggaaacttgatctactagttataattctccctttttcttctggtctcattatatgctagaattccttgattatcaactctgaaaacatggcagaatgcagtggttcacaaatattggtgtgcatcagattcacctgaagacttgttaagggatttctgggtcccactccccagagtttctgattcagtaggtagcaatattttaaacaggtttagaaagcttttaagagatataaactcaagtgatgcctttggtgccaatcatggagccacatttggagaactactgacataatgaaaagaacatagacttaattacagagaaaaaagcattgagagcatcattactagattcttgaaactcaattgttttcaatgaagttttcccaataataaagcctgtatcatggaattacttgaagcattacctgagaaatatttcaaatatttagcagtaataacccctcagtgaatgtacattcactgtactttttgtactttgtgcactttgtaataaaaaaatcagatctaacattgttctatgtaccatagggaaatggagatggcgatgtatagttcttgttctttcttccatgaactgttgttacatattctaatcttcagaaactcactttgtgttatcctatacagcataccatatttgctctttgctctgaaaagcttgctttaggcactaaggagaaagttttacttttttactttgagtttggagaagtgcacaaatggtaatccagcaggtaactgtgtataaaagctgtggagccacattaggctgggatttccctctttacaggtaatatttttaaatgaatgtgataatacttagagcatattttacatcctgcaaaggagtatactattcaaatatttgtgccagattgcgttgtaaatgcagcaccatttaattttaatttaatttaatttttaatttttttttttttttttttgagatggggttttgctcttgttgcccaggctggagtgcaatggtgcggtctcagctcactgcaacgtccgcctcccaggttcaagtgattctcctgcctcagcctccagagtagttgggattacaggcgcccaccagcacacccgggtaatttttgtatttttagtagagatggggtttcaccatgtttgccaggctggtctcgaactcctgatctcaggtgatccacccgccttggcctcctaaagtactgggattaccagtatgagacactgctcctgggtgcactaccatttaattttaaattttcacttattagttcacttgaattgccctgaagaatacttggtccgaacatttacatctatggataaggcactgagaaacagaaagcctgaaggaatttctcaaggatgatgaagaacctggcttaggtttgatctcaaaacacagactccttataaataattcactcacttaggtcattctcctccatgattgctcttcagtttaccagaggtttaatttgtttccccaagtattttcacatgcagattctttatatattactgtatttttgtgcttagtaatcttaataaaaatatcaagagtactgtttaggaaatatgttatctatggcaaaatagttcttaattataatgtagtgtttttggacagtataaatgatagcttagaattgaaaagagaattactatgcttaccataaatctccttgacaacaagttcaatgttttgaatactgaatcatttagaattttatgcagatttataggtctctcaccttggcatctcattccttttttatacatctgggattttaacagatgtataaaatctgttataattattactgctttatttatccccataattgttactgctttaacaaatatttttggccgtccaactcatttgtatttgaaatgtttgcctagtttttactatcatcatcatcatccatcatcttcatctttcttcaatatttattgagctttgaaaaactgtgaaaatcaacttcaaagaacatcttgattactttactgaaatgaaggtccttattggaaccctcactccagaaaaaaagaagtgattcacagattctgggtcttctttctaagggatatataatgtcagttaggcagttaccatcccccaaactgcttgcttctcattttgtaatgaaaagaaagctctctcagcatatagtattctgtacagattgccttcctgcctttggcggagctcctgtttctctgtgaatcattccttggtacacagtgttaccattgtgttatctgaaagagcgaatcctgctgggtggtggtgccgctactccattgggaaggtcacaagttcatgtctgctttgccttctgtctagtgaaatgtgttcccactaaggaatagagaattgcaatatttttctgcttatggaaggtcaggcgttcagtggtaccctagcagtgttggctaaaaggccatcaatagtggcaaattcaaggcaaggcttaatcttgcctgttgtctatcattccacatgtttttttacacctcttctcagtggctgaaaaatgaatttgcttaaggacttggttgaagtgactgaggatgaagcaggaggcccttaatgggaccctggagtgaaagcgcttgcagtttaactaagtggtctttattgattaagcaggcatttattgaacatcagctctatgccagacactgctttaggtgctggagttactgaggtaaatgaaacaccaaaggtctctgttgtttcagggcttttattctagtggaggtgtcaggcaatagcaatggcagagagtgagtgacagaagctgttaggagattaaagctgaggaaggtacgagaaagggcagggctgttgttttacatcaggtcattagggacagactttctgaggagaagacgtatgaacagaagagaaccatagaaagatctagagagagagctttccagaaagaggtaaaagcaaacagatcctgaagtgagtgtgagtcgccatgagacgggtgccacaaattcaacatttgtttgaaataagaatattttgttgataatgattatacacatctatataaaatacatttgaaaacacgacattatgcacaaaaaaccatcaccacttttaaaaatatgtgtatataatgaaggtataaaataatattttctgtcataaatttttccccagtagagccatcatagggttaaaacaatatgttttatacataatgtactgtaactgcttttttaacaactgaaaatgtacagaaaaatggtgttttgactgtctatctttagtcttcagctgttgctgtcacgattcagaaatttggatctctgccttaagaagcacattttcttagctataaaaaaatctgatggaatctacaactgtaatcataggctgtgactttagaatataaatcacttgttataaaaggggggtgttggtgtttcttttcttttcatttgattctcatttgtgttctcaatatgctttactttgagtttgttcgtatttggatgaagataaaattttccttggcttcagtgtgtggcaagcagtgcccatttattttaatagatactgtaccaactaaatcccaatatgtgtcaggaaattcagaaaactgaacccagaaatgatgctagacacagatagaaaggaggacttcaaaaattcctacatgttactttggtgattggtgtgaaggagtactttatagtatcttctaaaagtacagttactttcagaaaaatgagaaaaatttaaaaagattaaaaaacacagtatcattagaatttggtctcttgcctctaaattttctaaattaccaaaaataaaataaaagaaatttattggctatagataatatagcacaaattggataattttaaatctcagacatgtaaaatcagtacagatttcacaccaaaacactatttgtagcaatagtagccatgagaattaagtatctgacctgggaggccccaaaatatcaatctcaggtgtgtccgttagaaggtaaaaaatctggaaatagaatcctgagatgatatttctacctataatacttaaggtaaagaaaaggaggtacataagaaacgtttctagattttaacacaagagacaaataaattctttttgacatgaaagacaaataaattttgagttgcaaatgagtgaacatgccaaggtacgttaaactaatatactttcttccaaaactggcttaagattggtaaaagtgcattcaggcgaaattatttttaaaaattactcattaataaaattttgctaatttttgttgcttattcaaattgctttgtgttgtcctgaaatatgaaattatggagaaacaattctagtttcaggatacaacttaattggagttaataggtttttaatacagtgtgttgtatttatgtgtatataaatatggcgtattcatgtttccttttttttttttttgcaataaagtatagtggattaaagcctaagttttgaagtcagatgtttttgggttccaatacttaccaactggttgaccttgggtaattcatctaatgtttctgtaattcagtttctttatccgtaaagtgtagattatacagttcaaagggggtattataaggttaaatgtgataatgtgatgataatgtatataaaattaactagtacatagcaaactctcaataaataatggttattatctcttagttcccagtggttctctctttctctttctgccttccccccaagaaagggctggaactgattcttttctcatagcccttagaaagaactaactcagctgatgccttcatttttggacgtctagctcccagaactgtgagacaataaatttctgttgattaagccacccagactgtggtattaccaagaagtactaaggtagtgctgtaaaaatactttaaaatgtggaatttggaatttggttggcagagactggaagagatttgaagtgcttggtaggaaaggtctagattgcctccaggagactattgttagacttatgaatgttaaagatgtttctgatgaagtttcagacagaaataaggaacatcttcttggaaactggaggaacggtgatccttattataaaatagaaaagaacgtggcctacttgtgttctagtttctttgtgaaaaatagaacttataggtgatgaacttggatatttagctgaggagctttctaagcaaagggtcgcaaacacatcctggtttctccttactgtttatagtaaactgtgaagggacagactacattgaagaaggagttgttaagcaaaacgtaaccagagtgtgaagactggaaaaattctcagcctatctacattgcaagaaatgagaaaacgtgttctggagagagcatcaaaagtgtgactagacaatcatttgctacaaagagaagcatgtgactcattaatccaatcaaccatctcagcaaaagacaggaatagatatgtgatcatccaggaaacatctgtgaaagaccctcttgtctggtggtttggaaccctgtgaattgcacaggaggccaacaagatttttgagagttttctatcagcagaaacactacaaactctgactgaaggtgacagaactgggatgaagtgaaggaaaatggtcagacttctgggattctacaagcaggaaatgggttgattgaactatctggctggttgataatgcagatagtttttaagaaaagagaagaatgatccagaaggtagtttagaggccagcagagctgcttctgtcatcattggtccagagagcacaagcctggcaacactggggccatcgcctcattggttccagaaaaataggaccacctccttggtttcagagggcaggtctggccactaatgctcaggttctagaaaactggtgccaccccattcatgggcccaaaggacagaacactgagccaaagaggattattctcaagcctcaacatctaatggaatttttcgtgctaggttttggacttatgatctctttcttccttttggaataggaatgtttgtcctgtgcctgtcccaccattgtattttcaaatcagataactcattgtctggatttataggtttccagatggagaagaactttgccgcaggatgaatcatacttcaagtttcacccataatcgatttggatgatttaaatgagatttgaggctcagagttgatgctggaacaattaagacttttggaggtgttgtgatggggtgaatgtattttgcatatgacagacaacgacatgaatttttggggtcagaggatggacgtttatgggtttgtgtcctccccaaatcatatgttgaaattctaacccccagtacctcagaaagtgacctattttggagaaaagatctttacagagattataaagttaaaataaggtcattaaggtgggtcctaagccaacatgactggtatctttattaaaaacggtaattgcaacattgagacagcataaagggaaagccatgtgaagaggcatagggagaaggcagccatctataagccacggagaaaggcctgcaacatattcttccctcacaaccctcagaggagccgattctgctgacaccttgattttggaagtctagcttccagaacagtgagacaatacatttctgttatttaaaccacccactcatttgtactttgttatggaagccctaataacgtaatatatactattgtgtatgtcagaggttcagactgtattatcaaaaaggatctaatttatattgtataaggatagttgaacgagtatagttatttaggatggaagagaaaagtattaaagaaaatatctttgcagggctatatatgacccaggaatcctacatttgggtattttccatagaggaatgacagcttatattcacacaaaaacctgtacacggatgtttacagaagctctatttataattgagctcaaaactagaaacagcccaattgtccttcagtgggcaaataagtaaacaaactggtagagacttacaatggaatgctatttggcaataaaaattaatgaactattaataaatgtacatcttagctaaacttcaaggacattgtgctgaataaaaacttgatcttagcagtttaaacgctatatgattccatttatatgatatgattgaaaagacaaatcagtgatggagaacagatcacagattgccagggattagtggtggcaggaaggatgtgactataaaggtgtagcagagaaagttttctgagggtgacacaactattctatatcctgaacatattggtaattgcaagaatatctatgtgtgtcaactttcatagaaccctacaccaaaaaaggtgaattttatttcgtgataaattaaaaagtaaaacaaaagagacaaaaatagtaaccagggaagctttcaaaaaatatatgttcttgttcaagaccagcatggccaacatggcgaaatcccatctctaataaaaatagaaaaattagccaggcgtggtggtgggcgcatgtagtcccagctattcagacggctgaggcaggataattgcttaaacctgagaggtggaggttgcagtgagccgagatggtgccactgcacttccagcctgggtgacagagtgagattccatctcaaaaacaaacaaacaaacaaaatatatatatgttatctttaaaagtctttgctaaaactctcagcatgcttacatatcaaatgtctcaagcctttgattttacatatgtaatattgcagtgttttgattatatgaaatattatattgaagtaaatttgattaactctaaatttaattttaaatttaaatttaaattctaggactttatagcaagtcttgacaaataaaattctattttcttcgttatgaactaatgagccatcatcattaatgttactgaaatttttaaaaattctaatatgaacagatttaaaataaacagactatgtagtgaaaaacaaatcttgaaattaagtcagctgatcttgatctaacctaccattttggaagaattttctacattgatatgtattatgtacccttataaggctcatagtagtaaaatattaatttaggaaaatattgtctctgtgaaatagcttgtgaatgtccacttaaacacataatggatctctgcatattgttctttttttaagagcagtggagtggatttgatttaatattaatgtgtgctatactctatgatctctgtagtatcacagttaactggacttatataggcaattatttacatttaaaattttacagtgtagattaatactatgttatttttttcttatctatttcagacaagactactgacaaagtaggaaataataaaaagataaaagcttattttagagaaagaggttttcccaaatataactttgtttctaacagctatgtccttaatattttattcatttgaaatcacccttatagacaatttgctgacaggttaatattatctttgggaactggagtaccctcttttagtgtggtttttacaacatctaccatgggaacagcttccccttccatttaggtatctgactcatccttgctaatatatcttgatttaatgatgacctagggaagaaagagaggaactcccttagtatttttattctatgtaatctgccttctcagaatgtgccttgtgaaagaagcacctaattactctgctaaaaccagaaagcactgtgaggagaaagcctggcaagtttctcctaccagtctgccacctaatgaatagaaattgcaacacactggtattctgcttttgcactgcggcaggaatgtgaataataataattattattattaaaagaacaaagaaatgttagctaaaatggtaaacatagataaactgctgtgatttaagaagtttccatttggaatcctctgtaagctcaagtataaaaaggatattggctgtaatcactttcaagacagtaacaaaaatgcagggctaatagcagggcatgatttgacgtgccaaatttatttttctttcatatatttaactgctaaatattaatcaatcagaatacacaatgtcagcctctgaagatacaaaggtgaatacgatagtttatgtccttggagagctcatagattaggccaggagacaaatgaaaaaaagtaccataacatatcacaaaacattctgagggagacagccaatgctggtggagtacagatggatgaaacagctgactcttcttatggaagttgagaaaaaatttactgaagagttttcctttgaatttagccttaatggatgagacatgacatgcttgacaaagatgatagagaaataacacttcagacagtgaaaactgcacaaaataataaatatacaacattttgaaaatgctactgcttaatgccaatatagctcttactctaatttgagagaaatagcttattccattttgtttgatccctcctcctttgtcttattctgcaccaaggcgatcagttatttattcattcaatgaatatttgtttaaatacctactatgtagcaaacagtatttggggagctgagattacaggatcgaacaaacaaagctctgttccttatgaaagttaaatttcaggaggagtaaacagatgataacaaagtcgttaagtaatatcgactatgataaacaagtaattaatattatacgctgacaagtactatggagaaaaatgaatcagaataggggaggtcggtaggtttaaacagggtgattatgggggacttcatgaagcaagcgatatttgggcagatgctgaaggagatgagggaacaaaccatgcagatatactgggaaaaaggaaacttgaacaacattttctgtgaacaaaaaggaggccagtgtggctgaagaagaactagggggagagttgaagaagacgaaataagagaagtactgcagttggagatggggaaacctcatgtagggacctcaaggccactgtgtagactttgcttttactctaggtgatgaggtgtcattggagggctttgagtaagcaattctttcttgaatgggaccatctctaagaaacatgaaaccatgctcaagcatctaggatacaagcctcccacctaggattcaggtgactctatcaggtagtatgggctaaaactgatctttctgaagcaccattttcctaaagatgagtaattaaatagcatcatatggataaaagtgaggtattcacatcatcttataaagatatcatgctagataacttcagactcaaggatgttaagtatatgtgaagatgaacttctagcaatatgactggatcaccgtgggagcatgaattccgtcttctgtcccataaggtatcctctgttataaaaagcttggatagcattggtgaagtataataaaatggacactatagttagagtggaaagacctggttttgagtattggatcaactgcttaaaagctatgcaattttattttttgatttatttatttttttttgagatggagtctcactgttgtctgcctgggctggagtgcaatggcacaatctctgctcaccacaacctccacttcctgggttccagtaattctcctgcctcagcctcccaagtagctgggattacaggcatgcgctgccacgcccagctaatttttgtattttttagtagaggcggggtttcaccatgttggccaggctagtcctgaaccccccacatcaggtgatccgcccgcattggcctcccaaagtgctggaattacaggtgtgagcaactgtacccggacttgcgtcttgatattcttatctgaaaatgggtataataatttacaaataatgtacatttggtctacaaatatttattgactgtctactctgtgccatagtctatcccaaattccagaaatacagtattgaacaagactcagcccagcccaaaaggattttatatttcaaacagggaatttcaacagtatttgtctgatatatttatgaggatcaaataaagtaatatattagaaatgcttactgccatatatggcactcagtaggaatgcaaaaaatgtaagttacatctctataattcttttaaagagttgccagttaattttctaagagagctagataaccatttttattcagttgaatattatcttcttttcaatcatgttagaataattctctagcttcgttttttaaaacaaaatataaaaattgggagaagttgcaatttgggggttgctgtagttatatataacagtatatttactgttatatactgttgtataacagcatacactgctggaagaggtatgttagttcattggtgctctgttaccttgtctttgactgaaggaagggatcttgtatagctttacttgaatagagtctaatggttgtgtgttgttttagaaaaaaggaaccagctagtgaaataaataaagacatgatcaataataattcaattttattaatattgatagtcttaaatctgttcctcttttaaagatttttttttaaaagcttctggattgtctttttaaaaaaagcttcttaattcattgtcttctcaaatatccagctttgtatttacaataagtgggaaccatgttattttgagtgccatgttgtgctaggtataatattattgtatacaaactgcagttttgtccatttaaaatacttttgttttataatagttgaaaagtagttactcgtagaaaatttattccaggtcaacttttaaagtttgaaggatattgaatataaaaagtatgtaattattttcatccaaaataattgtattacaaagatgttgaattttaaaaacattttaaaccaaagttatcatagtgtcactataaatttataatatttttggctgtaattaattgacctttcttttcaattcaatgaaaatcaaaatgtttccatttttccacaatatttataataagtaatgcattatttaattgttattgactatataactattcaaatcctttaatgatattttattatgataaattattgattcttattgctttgacaggatgtgaatatcagaaatttcattatttaaaactgagacaggctgggcacggtggcttgcacctgtaatctcagtactttgggaggctgaggcaggcagattacatgaggccaggagtttgagaccagcctggccaacatcgtgaaacctgtctctactaagaatacaaaaaattagccaggcatggtggtgggcgcctgtaatctcagctactcaggaggtaggatcgcttgaacccggaggcagaggttgcagtgagcctagacagagccactgcactccagcctgggtgacacagcgagacactgtctaaaaaataaaataaaataaaatgtaattgagttataaaaaataaataaacctgagacatacctttaattggatttctcaaataattctcaagtatctgtacattgataaattaattgggaattactcatttctccttctgaggtgccaagggctaagggttatacatgaaccggaaggttttcattttattcattagttccttcctaggcacctgacagggcaaatagattctatttgccttttctcctgttctcctggctgtctctctcaaatagtatactttgctgaaatatagcataggatttatttttactgtgcttatgtttactttttcttagatagcattggctatttcctatcttgtaggctcatctttgatttcaatatttggcaaagtgtctcatttttttttttttggcagtttggctctaaaaacaaactttcctcctcttgccttaaacattttttttttcagaaataagtaattcagactttcaaagagtccgattatcttttaaattttatatttcaattggctgtctttggtattcctatcttttttctagagtaggtagaattaacagactttacatatttttgtgaacatcacatcttagaatgattctcaaaatttctttacttgggaacttggctgtcatagtagggaaagtgaaaaaagtaatgtggaatcccacgtgatggcacataatttggcaataataattggaaagtaattataattgcactattgtactgctttaggtaagtttatgtcaacatttctttatctaaactccagttcacatatagctatatctgggttgtgaaatttgctgtaatatttttagaaagaaattcctaaaatgcttactatattttggcagttttgaaaagtaaatatgagaagtatcttttgtaacttcaaattgctggggttttttttgccaatacatcactatgaataatggcaaaatcacatattttcatgtcccagttttaaatcatattattgctggaggaaagtcccagctttgttttcataattcagcaaataataggtagcttatagccatattttctcctgtgacattactaatagtttgtcttctcaaatagggcagttaaaatatctttagatattaaaacatgcattagagcctacttgaacaaaattacaattttgtaattgaattaaagatcattccattgggaatcaaaaaacctgggttttagttttagctctaacatcagcagctaatatgattttaggtaagttgcttaaattctctagctctgttaccttgtctttggaatgagaagctgaacaaggtgattactaggattcagtgcaaatctaaaattctataactgtgcttttgttcataatatattttagttaattattgaaatgttctgctttccagagtagtaccgtaaaccagtaatttaaacccttcctactatgtttcaaccactttcccaagggctggtatgggtcttacttgctcctacatgtaggagttagtctgctcttatttagtcctttagatatttagcacattttagcctgaatatctgacacagatgaatgatttttttttttttttgagacaaaggcacactgtcaccaaggctggagtgcagtggcgtgatcttggctcactgcaacctccacctgcttggttcaagtgattctcgtgcctcatcctcctgagtagctgggattacaggtgtgtgccgtcaagcctgggtaatttttgtatttttttaaggagagacgaggtttccccatgttggccagactggtctcaaactcctggcctcaactgatccgcctgcctcggcctcccaaagtgttgggattacaggcatgagccaccacgctcagcccaaatgattttataagcgtagaagacatctctcacatcttagtgggagaattaaatgtctctctttttcactgaagtcttaccgagaatcatttcttttctgtcactcttgctgatcttgctgatgagccctagttctgctttgtcaaacttatttgagatcaggctggcccttgtgacaatcattgccggtatagacttttcataacatccagaaacttcaagcaccactatattgtttctacttcctcatatgccttttaaagtatagaagctgtattccaatatatatctacatgttaggttacagtgatctgcttttggacttgaggcattttttggactcgcctgtccgtaagtctcacttgcattctttgtgaacaaagaatacacccactctcaaatgtatatgcccacacacaagcatacagtatcttgtacacctatctgcacacacacaaacacatgcatagtgcttgactttggactctgtgctttaactgagagtattcatttttcctggttgttaccttcattccagttttgtgagctttgctgtcaaagtggctgtgcatctagcatagagtggctgctgttggcaacccatgaacaatgagcttaaacagaagaatgagggtaatgtttattgtaataaagattgggcattaaattccttgggggaatgaaccaaatccaatgttttcctgttcgctgacattttttatattgatgctgttttggatcttctggagaagggaggaaaaaaaaacttcagcaaatcagctctttcattcaaaaatggaattcagaaggctattttagctagctttttttgacaatcctggatttaatcagtttttactgtgatgaagacagttagcctcacaaattttgtggaaatctaaagcgatgaagggtgttgttaagggggaaacagagtgcaattgtttaaataatcctgggccaatagcatttggtaggtggagttactgttgtgtgcattacagagcaagataattctgaatgaagactttaaacattacacatgctggacggattctgggtctgctctttgtgcaaacaaaacaagtgactaggttttgcttactatccattagtgaatgcagcttgtttaataagattttttttaaaaaaatgcatgtaaaggatttatcaaaagcctttatgaatatttcatgagttgatatattcagctgaatgaattcagtgagtgtcagtgtgtagcttgcagacaaacctcatccacaaggaggctactgacattggaagcactttggcgcattttcagaggcaaagccagcctgataaagctccttgtgacagcctgacttgctattcttcgagtatgctgctcttgctctaagacgctcatacattggagtcacagcttcgtaaattaaactggaaatagtttgcagacttatcagtcttctgacctgcagcagtgtctctgctatgtttgagatttttgttttggatggtgaaagctagcactccttacaagacatgacagcaaaagattcttcaaaggaacttactgcttctgaacctgaggtttgcataaagactttcaaggagcaaatgcatttagaacttgagcttccgagattaccaggaaacagacctacatctcctaaaatttctccacgcagttcaccaaggaactcaccatgctttttcagaaagttgctggtgaataaaagcattcggcagcgtcgtcgcttcactgtggctcatacatggtaagataagacttggaggtatctacagtgcttttcagattctcgcattagcaccagtgatctagcagtgtagaaaatggaacatttgagttttgttcctaaaacatactgcaagtgtgaaatgaatggagaccaggtcagatgaagagtacataaatgcactgtgtgctaaattgtcattgtgctactagctttttccagataaaatatgcttttaactgtagagtctttaaaattactgcttatcagaatacatagctaattctaggtaagtcgagtaataaatgaatttttaaagtcagttttttgtttcatatctgttgaggtggtaggtgacttttttgttttgtgattgttagtgattttaaaaaaataattttgggacatgaataagtgttttaatcttagttctaacttatttttaagataatgtataaagtctaacttaatgtattgtaccatcatgtttatagcatataaaccagtgagtttttgatttattgacttatctttacaatacttaaggaaagggaaaactaagttcccacttctgaaattgcatggtcagttactttaatttttgattccaaaatgctgttatctttaagagcttctttttttaaaaaaatggactttaaaatttatagctattttttaaatacccagcaaataaattcaagaaccctctgtaaaacttgcactgagcctgccacctttaatatacatgtttacaaggtatgtaaatatagtagggtaacgtccttaaacagtataatgatgaaatgtaaggaaaaaacacgatgaaattaaatcacttttactgtgaaagccaggccacttcagatttttttggaggctatattttctttcagattaaggtacctttaaaaattgagtagctgtaccttagttttttctagcagggaccatagcaatatagggagcatgtacattttaaaggcaattctaacacagtgattttgtgactacatgctgggttgccaatcaacattataaattgaggagatctgatttttaaaaattaatattcacttgaattattttctacttatctaaaatgtttgtctgcttaatctactgtatagtgcattggcaaattaaagttacgcctagaaatatatagcttgcctttgatagataccacatgcttagccaacacatactttgcctggcatatatgatgtgcttattcttgctttctgacaatggactgttcatataatggctttattgcagattttctttggtcatcttcttgatgtattacatcatgttgtttaattgtaatctcttatttgcagaatacacgtggttagtctttcaaagcctactaatgatggtaacattgtataaagggaaggtttatgtataaggatgtactgacttgaagaagtcctctcttttgtgctttatcccacccctaacatgtatgtattttcttatagtttgctgagtagtataactgaatagggaagatattagttatgaaaataatatatacagaaaatacacaattaatagatgcacattttttcttgagttaatattaaattgctattttaaccaaaaggatatttaattttagatagctaatttttagataatgataagtcttcttaaacccttggtaatatttttctttatgtagagttttggttctgaacacaatagtgtgacctttctttttcttataatagatttttgatgtgctaagaacatagagctataaatactggagttttttacttttccaaagaaccccaattttaaaatgattaaagagctagttttactcatgcattatacaaattttctggcagcaaaaggaacaattaaatggtatctgaagttacctacgctaataagatgatattcttttagttgagttaaaacaaaatgttacaattgccaaaaaaaataggactttgatataatgctctataatatagattaaaataattcattaatcattaaacttgtgaaataactttagttttgactatgattcattttcacccttttttctttcaactcacacattccccttctgatgtttcttagtaaaacagtttcacagtttgttttcagctcatgactaagtctttatttatatttatttctattgttttatctgaatacatgcttaacatttttcaaatttattttcatacaacatgcaatgaaaatctctttctagaaaatagacatgtatcttacatatttttatgactttttcaaatcttaaaaattttgcctttcccggggaaccccgataaagtctctagcctaatgcttcatgctttccccttgcttcgcctttttgtctcttgagcaccctaacgtctttccaatgaatatagatggctctgtatggtctgctctacctcctgtctctaagactcgtgagaataataaacttttctttcttgagtttccaaaaaatttcatgtgcttttttacatagatgaaatggttatatgaggaaataagagcataagtactttatttttgcctctttgtcatagtgaaatgtaaccagcctttcacgatcaacaattggtatttttccaaaccatgcacttaagttagaaattccaagatatgcacttagaagtctctaaaaacatgttattactttacagtagacagtaggcttcttttaagaagattggattgttttgattccagcattgaaattaaagtaattttcatgatgaagctaaacaatgcagaggatgcagtttatatgcaaacccactaaacagtttttatttgtagatttcatatttcagtcagatggatgtgtagttctggctttaaaaacccaaattatgaactgtggactaatggcagaagatttaagaaatatttatgaaattctgactctgggctatttaaaaatatctgggggaaatgtggatattcaatgtgttatcactaatcagagtatttacaaaatcctaaatctggaaggaatttggatgattatctcattgcttccttttacccttgggcaggaccacaattactccatctttaacatatgggaatctgccctacttttaagactctagagaaaataattctaaaatctcacttagtatacaatcttactactttatagtccaggtactagaaaattatttgttatgatttatctatattatttatatattatatataatcttttttcccctcagtggatattattaataaaaaagatgcgtaagagcctgcatgaatctgaagatcattattaactggtgccagcgttttctttttcattcactcaacatatgtaattgagcactgctgtgagcaagaagagaaaaaaaatctgattcaacccacatgtattccaacacctactatattttaagttttttactagaatgtctgcatatgttatcccatttaagtttcatttggaatataagtatactccaaattcatgatcctttcaatattacctgctgcagatatcaaaagtattttgaattgctctagcttcttataggtgtttatactccattcatcattattttgactctgaatcactatctcaaatttcaaaatttttctttgaattttgaaacccaaaagtggataccatactctttgttagacgatatgagaaaatatagatatgaaacatgtaataagttgcaaagtgtcaatggaaccttcagaattactgaattggaaaattactgccagagttctcaggtcagcatagtatttatccccaatcccacatcagggatgacaacttatgaagcacagtgttatcctacttggcctgtatggcctgcctgtgcttgcctggtacttgtcacacagtgtccagcttttataaccttcccttctttgttgatatcccaacttcagtcgtcagttctctttcatcattagcaacttgatgctctctgaagaaagctactgcaatggtcttgaatatatcctgggcccactgcacccccctgacccacccccgccccccaccctgctgcattgctgctcctttttggagctctcttcttgtatttgtgaggactaccctctatctctctgtccatgcttgcacacaggaaacaatatttttgtaattagaagttagtaggagaaaagaggcttgtattccttcttctcgtttagttttacctgtatcttggaaatcttttctcgttttaacaaaggtttatgaagtctttacttgtctatctaatatttgaatacaaaagttttaaaagccatagttagtactctaaagggacttatatttggcaagacaacactggattaagtggagaataggaaaaaaaacagtgaatatggcatatgattgaccttagaactgccgacatgcttgctgtattatacaacttagtcctagtttgttagctaactctactgaatctgtgctagtaatattgatcaattgccttgaattctatcctggtaatattggaaattttttgagagatgtctgtctttacatgtttattgattcaacatttgtttgaacaaaacagttgttaagagcctactatgcaccaggctctgatctgggcttaggagacacaaaatgagaaaaagcccttgtcttcaaagaactcctatactagctggaagacaaacttatgcaataataattaaccaatggtgtgggaataatgctactgaagcatgttgttcaacttgtcatgagggcacagaagaaataactaccactagagagtgagtcaatgtgttaagggaagtttcgagaagagatgacatttgtgtggggttgtgacaaatgaataggagttttctaggagaaaagtgggcaggaaaggtattttttggccaagggagcaataattaggaaatcctgttaacaaataataacaataatagctctaatatattcagcacttatataatgtgttggatattaattataaatgtatttactcatttaagcatataaaaccccctgagttatatactattatattattttcattttataggaaaaggaataaaggtcagacaggacaagtaatttgttcaagtttacacagaaaataaacagctgagttgggatttgactctgagcacgagtgaaaatacacatagttcactggggtttcagcctaaggatgcaaggtgggaaagctaggaagtaagactgtgccagcagattggagccatttgctagggcttccaatatcatgaacaagagttggagttttagcccatccattctcggtgaggagccacgacaggttatgagaaggggattgccatgtattatttttattttggaaaggtactttgcaggtcaggtagagaatggattagaggacaaggagcttaaaggtaactggaaaagggacaatgtgcatttgagagataatgacttctacttattttgtatatcccgtaacattgaaaactatgcatatgacatgttttatgacttaacaaattatggtttatggaaactgggaggaaagcatgtgaacttggtgtctcttgcatttatcacttacaccatgatgctgtagatagtactagctggtacaatacccccacatgcatcaaacaatcagcaaaggtgcataggaggatgtgtgtatctgaggaaaaccctattagctcagtcctaatttactagaggtgctttgtattttactttaagtgcagactcctagtgggttaaaaaaaaaaaaaaagcagatattatcttagtccacaatctgaatcaaatggcagtagaaatctatgcctcatagcctgagtctgttgctttaatcagagcaagcattttatcagtacatctataaatagtgttttcctggccttttagtgtcatcaagtcttcaatatattggatttttaaaatacttacagtaaaaagggctttgcaaagtaatggtgacaacccccaggacacatgccggaaggtggcccagcaagcttgccagctgcctttctgctaaaggctaaacccattttgctaaatcccacttgcgttctctttccattcctttctgttttgttatctctcagtttttctccttggatgtttatagtgcttccttctctaacatcactgtcaatgcacttgcaacattatgctagaagcatttaagcgatttcttagaaaaaaatctcaaacgcttaccatggttttcaggccctacattatctggccccaggctgcttccaacctcctctcctgttctccagccctgtgagcctgctttctgttgttcagcaaactaagcctgtattcacttctggcctttgcacttggttttcttctgcctggaagaaaagtacctggatgttaacacggtttctccttatgtccattcaggattctactatctccaggtatcactatccggagaggcctttgctgacctccctatctaaaatagcaccctttcgccttttacttccttgtctttttggtacttattattacctgaaaatacattatagacatgcttatttgttatattgtcttatcctttcatcatctgccatccctgctaaatttcatgagggcagtgattctgtcttgttttcagtatcctcagagcatacaagaaaggcagtcatttaacaaatacttgttgaagaaataaagaatgaatatggtttctgtttcctgctctttattctatgagcatttttcctatagcttgatatgatggaaatggaaaggaagctttgttgatacttactctataagcattcttctccaatcatctctcaatagctgtgctctctttctgtcagtagagctactgcagcttgcttcctatattgtattctatgatattgcaggtatagatttaattataatatctcactagagcctaaatgctttacatagtagcctatttaattaagtcaccatgtacaaatcatacctcctagtctgtagtgctgtaaagtaaatatttgtctgtagcactgtacaattatttatttggtttttcttcattcatcaagtagcatggttggtgcatcagctcaggaaagctctacatatctctcaccaaatgcctgaggagaagtgttgtatgggggaatctacttgttattttgccttcaaaatatttacatagtgtacattagaatgcttaattatctatatttttccactgatgcaacatttacaatattaactctagcagcagctacagcaatttgagcttttaataggatttccccagggaacttggaagtaagaagtctatgacttgcagagtgaggaaattgcaagttaataacccttgtactctagaaaagacgtcactgagagggaaactgttcacttggttctgcctcattttttctttcctgaactaggaggttggggacctctgtcactggtagtaatttgtttgacataaatatgtttgaataccactgtgtactttaggttgaaatgaaaaataactcaacttctcaggttgcttcttcctggaacttagggagaatgaggatgactgcttctcaaaacctttgtaaagagaatgcctatgagatgatgtgctcccttgacagaccaaggcttgtcctcctcttccaaactatacctctcaaaactcagctttattgcaaactatgcagattggaagtcaggggatggaggatagtgtagcttcaaagagtgcttctttcaaactgtattttctggaaaatcagtgatctaggagccatttggagattcctcgaaaaagagggtggtgatgatctgtttcctggttctcggtcagaacaaagcaacatggatgattatatgcttggagaattttggaggattctcacacaaattctataatctccaagtacttgaaaaccaccagtttaagagttaaatgagtagagggagaaaagaaatctgtttagttgtgcttgataaagtcacagacatttccagataatttataatattaaaatcatcttcatctaatatgtccaggaatggcagcaggataaatgaggaggatgaaagcaactgtgggtcagggagacatcactggtagtgaacatttaaaatttcaaagttgaaagaatagtacaatgaacaccttttacctagatatactaattgttagtggtttctcttatttacctctttgtctctttctgtgtataaaatcatatatatgttttctttatgttgaagagagcacatttcgatggagagcaatagttttgggatcaaaagaaaaatattatttattttaaaacagtttccatgtatcaagcttgctgttattacaattcatccgtgtttttgcatttattagtaatttattcccttttattattaggtggtattcctttgtattgggtgtactacaacttgtttatctgttcaccaactggatcaaaatttggatttccagtcttttggctattatgaataaaggtgatataaacattcatgtatggttttctgggtaaacatatattctaatctttcttgggtaaatatcttagagtggcattgatgggttgtattgtgaagtatatgcttttttggttgttatttgtttttatttttttgacatggaatcttgctctgtcacccaggctggagtgcagtggcatgatcttggcttactgcaacctctgcctcatgggttcaaactagtcttgtgcctcagcctcctgagtagctgggactacaggcacgtgccaccacacccagctcatttttgtattttttgtagagataggttttcaccatgttgcccaggctggtctagacctcctgggctcaagcaatctgcctgcctcaacctcccaaaatgctgtgattacaggcatgagccaccgtgcctggcctatagtatatgctttactttataaaacactgccaaactgttttccatcatggatgtcccactttatagtcttactagctatatatgagagttcttattattctgtatgtgtgagggcattttgtattgtcaagttttttttaaattttcgtcattctaacagataagtagtggtaacttactgtgattttaatttgtgtttcccttatgactagtaataccgaacatcttttaatgtctttatttgctatccttatctctttggtaaaataaaattgtttatataagtcatgtatcaataaactttgcaaatattttaatttttaagagcacactgacatattggcaagttatgaatacatttgtagcaccggtttaaaaaagaaaactattaaaatatagtagagggctaaaggcatctatcataacatgatttttcttgctgataaattattggttttcatttcttaaaatggtttctaagagatgatgtctataagattcaaattttcttcctcaagaaggaagtttttttaaaaaaataaatctataataattttataatatatatgaaacactatataatgccttaatgtagtatactgtagaacttggggttctatcactgtataattttgacgttgtctggaatttatttttcatggtgaatctttgttttatgtgacttcatctggagttgagaatgctaggttgggtatcagtattttaccttgatttgctcttgaaactttagatcaatcctagaactaatttaattgtcctagacctcaattctttaactggcaaaatggagaaaagagttttatattcagatatttgcaaatgttaatttaatttaaaaaatatctacctagactgtgagttacctatttcttgagataatgtattaaagtacttagaacagtacttcaagcattataagttgtttaatagatgttactgtttaattatctgactaaatctctaaacatacacaaacattcatattattgtcagggttggttggtaaagcaggaactagtttttttttattttttgaaaagcatcagtatgtatggactgtgccaatttggaagagtcaaagtgcatgtgggttagtaaagaagtacatttataatatccacagtgtgacaattcagtatactaagaaacaaagtatcattcatttgctgtcatgtaataatcatatcctaatgaaccaagctaaattatactaaaatgcactaattatcagaagacccagtgtgaatagcttacattcccgataagaaattttattgtcttgttttgctctcatcaatacatttaaaaaaaaaaaacatttatcatcttcactctgtgaaagagataggaagagaaccactttgaagtcattccatccacttgtaccaataagcttaaaagtaacaagacaaagcaaaacataagaagatgccttgtctatttcaggatccgcatattaaaagccaatataggattcagtgaacaaatgccttggaagaattccagtgtcatcaaacttatttatctcaaaacgtctccttccatcctttctgatcctctacaaaattaataagctgagactatttgttgcagcacagaggatctgagcatgcttctgtggcttatttctgctgtaattccctcagcagtttatacaggaattctttatctcaccatcaggattctttaggccagaagagaggtcagagaagactggacaaataaactatgggatctaagtctttcttgctaaggtcctaactgcccaagacttcctcctgagagtctactgttgaaattcatatgcaaatttcagtttcatgggattaaccctggctgttgtctttacctgtcagcctgctcagccaggtgtgagttcacccataaaacagtgtctttcacatgctcatttatcaaaacgacatagagactttaggatgccaggtgatatgatgcaaaaagcacaacatttggtttctaactgcatcttttaccatacactgtttttgggcaaaccattcaacctatcttagaaaaagtagaaaaattagaaaaattagaaaaactctacttgtatttcattaggcctttatgaagattaaatgaagtaatgtgtgtatgatggttagtataatccctggccaatggcaggtaataaaagcagtccttagttcactaatgtatcgagagcttatgattttgtgtaaaatttatataatatgtatcataatgtaaactacttaaagatctttataacatggtttaattaaatcagtttcattgagcaaatgtggtgcatcttaaatccattcttttagaccacttagatattacttagtttcataggatatgactttatcataaagcacatattaattatccttaccacaataaaataaaaagtaataaatccttatgtgttatggtgtgtaatcactctcattcatcacagagaccattccaaattgcagattttgaccatagaataatcttttttctttaaaattccagttaccttcttgaatttgatactttctccattagtgaaactattaatagataccaatgaagcactgttttttttaagttaacgtaaaaaacatttaatggtcttttcaaagtgccagaacatctctgaagttgttttccttagtgggatctaacctcctagtgacttgtttatatcagaaagtttattcatgagaggcagtggaaaagcacctagggatctagattgacagaatctagacatgtttcctggcaccaccacttacaaactgtttatttatttgtttatttatttatttattttttgagtggagaaggagtagttctttaacctttgggagcatcaacttcctcatcagtaaataagagataaaacaatatcactgatttctctacttatatgattttatatgattatataacatttacaaatattaattagtatggttgagaagcatgggaaaagaaagataaagattactttacagaaagtaagggtactccatcattaaaatataaaaatcaaagagcttgacttaagtgccgcaggtgtatttcggtatatgtaaagagcatcccattaataaatattatcaaataccatacacattgctccagatttattttataaaagggggaagagtttctgctttatgggaccatgtaagtgagagactggagacaggagacagactaagtggtaccttaagatctcatctaccccacgggtctttatatcacttttagcttcctgcagaaagataataacaagctcatataaccaatatataatgaagtgaaagttgcctttattcagacaactttacagcatttaaatcaaattgctctttatttcttggtcatttcaaagaatatttaaggatgaaaacaaaaataaaggttattgcttctgctttgagaaagttttccttctcacataatctttgatcaggctattgtgtcacttggcaacttaaaggcaggaaaaagttatatctttaagtccagggattctatttaaatgaattgccattgaaaagtggttattcaaatcaactcacagcttagtaacattgaaaaataaagtaaactacttttgggtttcacaaggatcatgccaagtttctgggtctgtctaaattaataaaaataagacttaggaacctgtatggaaattgtagattaaattaagcaactgcttcatctgaataaagctttgcagagtctaatattatgaaggagctatcttcatgaatacagtgcttgcttgggattcaagggatttgagttttaatgccagctgaatccctaatgcccacggagcacatatgcattcatttgatgctggtagcttttctgtcaagtgggattaataattacctgctctaccacccttaccttatgtattatagtatgaatattcaataccagtgttcacggaatgctctgcctttctgcaaaataacatggcagaagcatttagaaaggaaaaaaagtttctaaaaaagttttatgcgtatcagattttcaaaaatgtgtctcagctttaaaatacattaatgaattttgtattttatatgaaccctaaaaatgctcttgccaagtacttagttatctgaaagctaagataattgttttgggtttcttacagctttgctgcatttgtgtatgttagtcctttgtcaatggataaacaccagattgacatcgcttagtgagttaactctgatgggtggctagtattttcgttttttattgattacaaccaacagatatttattgctggataatgcaaacatgaggcaccatgccatcaaggagctttaatctgggtaaggagagtatatagtcatttggcatgtcaaatgattaatttttcacagatacaagtgttaagagtatatcagtatagccaggcatggtggtttgcacctgtaattccaaccacttgggaggctgaggcgagaaaattgcttgaggccagaagtttgagacaagcctgggcaacatggtgagtgatatggtttggctgtatctccacccaaatctcatcttgaattatagttcccttaatcttcatgtgtcatgggagggacctggtgggaggtaattgaatcatggaggaggttcccccatgctgttctcatgatagtgggtgagttctcaacagatctgatgactttatgaggggcttttccctgctctgctctgcacttttccttcctgcaatcatgtgaagaaggacgtgtttgcttcctcttctgccatgattgtaagtttcccgaggcctcctcagctatgcgaaattgtgagtcaattaaacctctttcctttataaattacccagtctcaggtatttcctaacagcagtgtgagaatagactaatacagtgagactcccatctctacaaaaattaaaaaaataataaattagccaggcatagtggcaagtgcttgtagtgcaagctactcttgaggctgaggtgggaagatccttgagcccagcaattccaggctttagtgagccctgattgcatcactgcactctagcttgggcaacagagtgaaactttgactctgaaaaaaatatataaaagtataaaatacagggccaggcatggtggctcatgcctgtaatcccagcactttgggaggttgaggcagggggatcatttgaggtcaggcattcaagactagcctgaccaacatggtgaaaccccatctctaataaaatgcaaaaattagccaggtgtggtggcaggcacctgtaatttcagctacttgggaggctgaggtgggagaattgcttgaactctggaggtggagtttgcagtgagccgagatcatgccactgcacttcagcctgggtgacagaacaagaaaaacgaacaaaacaaccccccccaaccaaaaccaaacaaatgaaaaacaagtataaaatacaatgctctcccactgctaccaggtggaaatgatctaattatgaaactacaggtttgaagagcaatggttccacttctttttccaaatggctgtgagccttgagtctgcccctgttatggtgacatactgagcaattaatcagtagtgagctatacttgagaatctggtgtactagcaataggctaggtagtctgctgatgtgagcaggtaggaaatatctcctaagacagagggaaacaaattcgcattttaatttttttcacataaaaattaggcaatgatagaacaattacatcatatatttcttatatcatttagtcttcatctccatttgcagatgagaaagttgagactcaggaaggtcgattaattgataccaggtaaacaagctacaaagaaataaaccaagatttagtacatgtgttctgatttggagtaacacattttatatgctgacaaggtccatagatacagaggtatatcattacacaacccgccccatcccctttgcaacttccaactcccagctcctgtgggaaaatatccagggttactggattcacatgttcccttattaaaagcttcctcccaggaaggcttgtaaaattcatttgctcttacacataatggactcatggggtttaatttggggagaataaaccattaaactagaagaattaatttctacttacagaatttggcacattagagagaagagacaaaggggagtattttggaggatgaaaggttatgttccaggcatggaacatagacgatgggctgaatgtccaggcatgtcattgtatttgcaaaccattcattcactcattcattcattcattagcattgtcaaccacctgcttgattgtgcccatttcctgcctttcctgtttctatagatgaattatctgtgtacctggttaaggccaccccttactgtgcactgcattatatcagtactcacccacaagggctttgctcttgcacttgtccccgctgtctcctgtatcatcagttttccattctattaaatggtatccatttataaacatgctatttccctttaaaaagccctctttgacccgaggcactcctctatctattgctgtatttcatttctcccttataagcaaaactctcccaaataattgtactgctctactggtttcctctcctccagtcatcttctggaaacttctaaccaagttttctcctcacaattccactaaaagtgttcttcctgagattatgacattccatgtgccaaatataatgaccaattccttcacttggcctccagaacactgaatgtctttccttcctcatgggcttctctttctcggttggttcctcctcatgttcctcaagtctaaatattggaatgctccagagggttgtggacctcttcatttttgtcctataataactccctaggccaagtatctcaatctaaataacatccgtatgctgatgcttcccaaatttatatctctagccagacttttcctctgaactctagatctatgtctctctccagcagccttcttgacagccaaaacttagcacatccaaaatggacatcatggctttctcccccctacaccatgcccttgatgtaacatgttccaaatcttttccattgcagtaaaatgcaattcaatttttctaattactcaggtcagaaatcttggagtcttgcatgattcctgtttttctctgatatttcccatttcaaatgcatcagcaaatcctatcagctcaacattcacaaggaagcgagactgtcaccacttctcatcaccagctgtcgctgttctgatccaagtaaccattacctcaaacctggattatcaaattaacatcttactggatctcccttctttcattctttcccctttacaattaattcctcttgtagctgccacagtgatcctttatattatctgatcagttgtttcattcctctattcagaatcctttaacaacatcctatttcactcagagtatgggtcaatgtgcatgtaccatgcctacaaatctaccctggtctctacctattacttctccaactcctttccttcccctcacaccatcccagccacactgctgcacttggttctcaggctaagcaggatttcttatcaagacctcggccttttcttgttgtcaagaaaaaactttctccagatatctgtatgggcttttcttttcttatttcaggtggtgtcttgaattcatctaattggagaagactttttggccatctataaaaaatagcagtgcacatctttgcctttctaccatcattatccctgatttgggttctttatagcacctgatgtatatatctacatatatatgtatttttctatatctacatctatttcatatccatatgatctgtatctttatctatctatctatctatctatctatctatctatctatctatctatcatctatctatctaatctttggtattgtctgtctcttttctctctccaattagaatataatctccatgaagacaaagaactttgtctattttattcatttctaaatcctcaaaactagaacacatggtagcacatggtaggtagttaatacatatttattgaatgaataagtgaataaatagacaaatgagttgcagactgtttgggtaccttccagttttaagcactgaggccccatgttgaatgggagagggaaatgtgaacagataatttaaaatattatgtgataaataaaatagtaaaaataactattgcctttcaaagtaattttatctggaaatataaattttaaaatttaaaaaatattatataaaatttaataagagattattttctttataaagagaaagaggggcatttggcaagtatactaaacttaatagcaagaaaacttaaattcatattgtgattacattgtttactagctgtagaatcttaggaaaataactcatctagtctcttcctcccattgtacctagtatactatctaatttattttatagttgtgaagatttagtcagataatatcatacataatgggcattaagtagatattatttttatttctttccatatctaatactatactttacattcataggttaaccttctgtgatctgtcttattcctctgcaatttttcaatgactttctaaattcccacttcattgactttcttccattttcttcctgtgagactttttgacatcatgtgatgccatactcagcctcatcatccccacgaagattaatcatctttctctccttgcttcaacaatattgcatgtgatatttagctctatttctatggatggaagcaaggagagaaagatgattaatcttcgtggggatgatgaggctgagtatggcatcacatgatgtcaaaaagtctcacaggaagaaaatggaagaaagtcaaggaagtgggaattttgaaagtcattgaaaaattgtggaggaataagactgatcacagaagtaacctatgaaagtaaaggaatcatataatgtgtactcttttgtctatttttttcactcatcagaattactttgagattcatgcatgttgttttatgtatgcatagttaatcctttttattgctgaacactattccattgcatggatataccaaaatgtgtttattcattcacttgttgacaagcatttgtttttatgtttttttgctattacaaataaaacattcatctgccaaaaaaaaaaaaaaaagaactggtgagttctttagctctatttctatggatggaaagctggattaattttcaacattgtaggacagtaataagtgaatatttattctttaattggaattatgtttctttgagttgcttgtcactaatacgtagtgaatcaatggaaatgaaaaggacactcataaagtaactgcatagtgagtacataaaccaaaaccatggctatctttttaccctgtgctacagcaaggctagtgaaacaagagcaacatgaatatttttaagaaagagtatcacaatggtaaattttatttgtagggcattatgtagaagagaaaattttcaggaataattatattagactcatctctttgatgacagacactatttcctattcatattgcaaaataattggcaagtacatgttttaaaaaaatgagtgttttttttcctgtgagacatctgtattttactacaggtgggacaaagttatttcggtccttattttgccactaggatattggcaggcagagggtgacaaaataatgtaacatctgaaatttcaggctatgaggaaactcacatacatacaatttgtcagacaattaggatatttctaaaatgtgaacagatgtataatagaaattagcaaaatgaaaaatgacctttttttgtttttgatggatacataaagaatttatatgcagttttctaggttagcctagttaaaacctcttctttctacatattcagttaagaaataattgttaattgagaccaagacattataattgtttcccttttgtattataataatgaaaaatatcaagaattatatcttataactttttacacaggtccaagtgatgttttctgaacttgcatgccacatttttttagccaagtgttcaccagttgggaactcctaggggttgtttatttttcagtgaaagacaatcttttaaggagtttatgtcctaaatattttctggttttgcagtagcatacatcagacatagtcattgtgtttggattgggattttcacttttaacatgttctcaaattctctaggcgtttaatgtttccatctggtcctcataaaaggtttcacatttgtaatgcagctcaggctcctactcagagagcatcattataattctatccatgactctagtttgatagagcagatacttttaaaactttggatttgttttttgcttttgtgttctgtcttaaacctaggaataacacttgagtttaatggttgtttctctctgaaaataatcatagtgtgcacaccatgacaacaggctcacaccccacttccttctgtgccgtttgaagctcctagggcagaaggagtaaccacattgtgagcccagtatgaggaaacttagcagtcgtcttactttctcttcattaaacaatctgttctcagtcatcacagatggagaggatattttcaaggacttgaacattttcttgaaatagccaaacaactaggaatctccttttgccatgttaaataataggttctagggcacaatttgagcaaagttcacagcttctagcaaggtctttttatgtagttaggtgtgcagtgcatgtggatttgtttagtgagtatgtacttaagtaacactatatgtcaggcaatgctctaactaaacttcacaaatagtaactcatttaatcctcacagtaactttatgaatacggtactattagtatccccatccaaggatgtagaaactgaggcataaggcaaaaagaccacagctagcaagtggaagagccagaattaaaacctaggtggtctggctcaagaatccatggtcttaactgtgaaactgtgctatgactgaatgtgttcagtgtcagattttcaaagatctattattatcttcccagaattgaattgcacactttgtgtaactctccccaacaccattcttgattcataattggtactcagtgaatgtttttttaccttaggatttaattaagagtgagtgaaatgataactgattttgccatcatttgaaaaaaaggcagaaccaaaggtgaatcataatggtagccagtggacaggcagtttttcattcagaagtgtcaatggatcccgttatccaaggataacctatatttaaggcccagatacttctaagatgatgctttggattctacattttcaaatctggaagaactatcttcatttcactaattgttctttactgatacagtttttttaaatttaagtgtggtgaaacacaacccaaaatttaccatcttcgctatttctaggtgtacagttcagtagtgttacgtaattcacattcttgtgcaaccagcctccagaactcttttcatctttcaaaactaaaagtctataccacttaagcaaccactcctcggtttttcttccctctaagctctcagaaaccaccactttttaaaaaaaaaataactcatccacctatggaaatttaggttgcttccaccttttggctattgtgaataatgctgttatgaacatggatgtaaaaatatctctttgagactctacttttatttctttggggtatatacccagaaatggaagtgctgagtcatatgataattctatttttaatttatttcccatacggttctccataatgactgtatcatttgacattcccaccaacagtgcataaaagttcactttctccacattctgaccaatatttattattttctgttatttttttctgatagaagttatcctaatgggtgttagatggcacatcatcttggctttgatttgtattttcctaatgattcgtgatgttgagcagcttttcacgtgattattggccatttagtatcttctctggaaaatgtctgtttaagtcctttgtacattttaaaattggcttgctgtgttgttgttgagttgtaggaattctttatatattctaggtattagcccattgtcagatatatgatttgcaaatattgtctcccttctgtggactggcttttcactatactcttgtgttctctgatgcacagaatttttacatttttatgtagcctaatttatctactttcacttttttgcctatgctttctggtgtcatagccaaaaaatcattatcaaatctagtgtcatgaaccttttcccctatgtttccttatagaagttttatagtttgggtcttgtgtttaggtttttgatccattttgagttgatttttgcatatcgtgtaagattagagtccaactgctttcttttgcagtatccagtatcttttgcagtatgttttgttggtacccagctctcccaacaccatttgttaaagaaaaaaaccatacagatttaagggaaactcagaccacatagctataaacctggagttcctctcatactttggtccaaaccataatagatttagaaagaatcacgactaaagttctcaactgggggctcttttctcctggcgagaacatttagcagtaggtggggacatttttggttgtcacatcttggggtgggagtgggggtagcagttgttactggaatctagtgagtagaggttacgaatgttgctaaataccctgcaataaacagctccctaaagcaaagaagtatctggcttcaaatgtcagtagtgctgaggttgaggaaccctggcctagagtatagggaagtacaggttatgttgtaggactggaaaattggggaatctcctttttttgccatttgagggcttgatgatcattgcacaggtgactacctaagtgtccaattattgactacttggtagttggttttttaaagatacctgaatttcatatacatccagttaggttttaacaacagaatgctattttgagcttaacttttgcctttaagactgttcttctcactttctttcaccataattttgtccatttatgcattcattttctcttttctgtaagaaaacaagtaaataattgtaggattgatcataagaattggagtcctattagactatacaataatcaaggattacagaaatgcctagagattgttttggcctagctgctcctcctacttctgagctacttacaggagaaagatgcccaattgacaatataaacatgaaattaattactttataataaatagttaatttataacacccaggcttgtgtttaaaattccagagcttggctctctgctgaactgagctggagtacacgacttcagcccaaagtaattttatattgggtgtttatggtcagggaaacttcgttgcagaggtcatgcttgagctgagacctgactggctaaaagcctcaagccatgagaacatttggaagaagagtatttccacaagaaaaaaaaaacagaaaattaaagtgcaaagatcttaaggtaggaataaacttggcatgttcaagaaatagaaataaggccagtgaggctgatgctctgagttactgaggataacagaagtatgatgcaactgctgaaatcaaattaatatttctttttccagaggaaaaggtggggggtgtttgattagaacttctcctggtataaggggagattctctcaaccttggacacctgaagttggcaggtgtgtaaagcattggttttgtattgcatggttggttcacgttatcaattactgtttaagtatttatttattcacttttcaaaaactgctaataattttctatattctaggcaccattatagggctaggcattggagaaattgagatgcataagacaaaatgcttatgtttaggagctcgtagtgtgcatttatggattggatagttggatagaactcttctaattattgactatgtgaccttgggaaagttattaaacctctctgtgtctgagtatctccatctctaaaatgagatatttattgcagttacttcatggagttgttgtgaggattaagtgagttaatacctttaaagcagcacctgagacgtaataaccactcagtaacttagctattattgttgtggtggttttacagaagcacaggaagagactcattaattcagtctcaaaggttagagagaatttaaaagaaaaggtgaagtttgagttcattcattaactcatcatttgtttgataaatatatatcaagtgcctactgtattccacatactacttttctgctacggcacatacttctttcttgctgcctggattatctttgacaccattattcagctgtcaaactttaacatccacatcatcctcttcaatgtaaccttcttcagtttaaggaagagtatatattagagataaaaattgtacaaataataatttagttacaattgtcaaccatgatatcaagtgtaatccagtcagtgagaggaaaaatgcaaggaacatctaaaaagtgtgaaagataaggaaatgtcttagctaagagatgcaatatatgagagataagaaatgcaaaatatcataagaaaaaataatcataatcatcaactttgtaggtttcccaaacttcttatagtttatgtatttatcttctaattttctaagagttgagcacttataaccaaaagggcttcaatgcttgcttttgagtcagccataagtggataaggagcaaaaggatgcagcttgctttcaacgccaagtcagacttgtgttggaggaggtgtttagggatgggttttctaagggagaagaatatgtagggcacctactgaaggagaagagtatgggctctttggccattcttgcagagaaaacaacagagtgtgggtgggataaggagcagaactaggctagaatagggagcattaggttggaacaggagggctggagggtagttctctggaattttgattgtgcctatataagcaattctttgcctttttttggatttacatacttgatgtcttctttcagactgttgaatattagagcaaacatttgagagcagagaatttattgtatttgtgtaaccagtatctctcattctgctgcatatatataaggcctttagtaaatgtttgctgaatttccctatcaatttatatatcaattaatgagataataaaatgagattggaagaagaggatcatatccagtagacctagcctataatttgttcaatattgatgtgtttaaaaattaaaaaagctacctagataaaaggccaaaatataacatgtagttatgacagtcagggtttatttagcatttctataagccagtagcctttcaatttattctgcatgtattcagtggtggtggtagacaactggttttgagtcaaaattgcatataggatcacattttcttgctaattcaactttcttagttctaggttggtaaatattgtagaaaaagcaaaatgtttcccacatgtctacagattttcttgctttaatagcttcatttgtgattttgggaaccagaatatttttaaataaaacaagtcatttattcctggaataagtccctatgccatgcatgtcttgagattagaaactcagctgagagcaactagtgattattccctgactacaactatttgtgagatacagaaatcttaatgatgataatccagtattagtgagatttttaaaaaatatatatatatatattcaagggtgctttccaagaacaatttatacctcaccaattatttactgagttgtatgtggaaattggaattaactggcaccatttatttcagttacattttgaaaccacttacagattgacacctgggtaactggctatattttatatagctctgcacggatcatagagttttagaggtagaagttagttttttcttttagtgttactcttgtaacaggatgtatttaactgtttcagcaaaaggaagacagacgtttccatctaaagagtatgtggttttaggccgggcacggtggctcacacctgtaatcccagcacttagggaggccaatgcgggcggatcacgaggtcaggaggtcgagaccatcttggctaacaccgtgaaaccccgtctctaccaaaaatacaaaaaattagccgggcatggtggtggcgggcgcctgtagtcccagctagtcgggaggctgaggtaggagaacggcgtgaacccaggaggcggagcttgcagtgagccgagatcgtgccactgcactccagcctgggcgacagggtgagactctgtctcacaaaaaataaacaaaataaaataaaaaaagagtatgtggttttgacttttataatacagtagattctgcttgaataaattttaagattaagtattttaatgtgctttgtgtagatacaacagaaatatcaaaggacaattccaatatgaggttaatattttaatatcttatatcaaaatatctgagcacctagaaactggcagtgacaattaacagcttaaatgattcttcaaataattcaatttaagggtaggatttggaaacaagtagcattatcagactgaaaataacaccattttataagaatgtctatggatacaatcttaagttagtggcgtatgccttttatatatttatccaaccattatcctctatgtgcaaagaatgtgatctaaagaatgtgttaaggcagataatacgtgtgtattataataattaaaaggttctgtgatacagactctgacctgaggataaagtactacaagatataataactaccataattttatattttataatgataaaactacctatagaatgaaataccttatatcttactttttgctgcttttgggttaattatgcacttaaataaatggatagagttcttacttaccgttttcacatttaaattcatcctgatatgatgacatatagttttaatgacctggttaatactgatgaaaactttcagtggcagtgcctggggccagtagtctgctgcatattttatttttatattattgcaataataacaaaagatattggtgcttcttttcacctacaaataatcaattaaggaactgaagcttaatttatttaaaaagcaatttttagaacaagtcgatagttcacatagagctatttaaatgtcccatgcaaattgatggaatgttctagcaaatattatttagaaaattattattattgttattctttttttttttttttttgagatggagtcttgctctgtcacccaggctggagtgcagtgatgtgatcttggtttgctgcagcctctgcctcccaggttcaagcaattcatctgcctctgcctcctgagtagctgggactacaggtgtgcattgaaatgcctggctcatttttgtatttttagcaaagacagggtttcaccatgttgggcaggatggtcttgatctcctgaccttgtgatccgcccccttgacctcccaaagtgctgggattacaggcatgagccaccgtgcccagactagaaaattatttttaatagctcacattctttgcccagtcatttcacaccggtattccataagagttcccttgcagccagaaacagaaaggattagattttaatatcatctaacaatattcttttgttgtttaatcacactttatagtgctaacccaaatctgatctggaaatctgttcagatccagtttgaggaactagttgagtagacaatactctcagagagctacaggaactaaatgtacatctcttgttcatttgtagacatcattcaagcctcaggcttggattcttcgtttaggtctgccagtcaacaagaattcactgggtggttactcatgacagagacctgtatgagactgtgtacatagaagtcaaagaaaaatagttactatcgacaagcatatattgatacatataggcacaatttttctttcaaaagtttgcattactgttgaggaaagtagacatctatatttttataatgcctatttgaaatttgtccaggaaattctgttgctggtcaacagtgtagctaggcctggtataagaacaggtcaggtacagtaggattctgattaaggcaggtgtctggcataaaaatagtgaacgttaggaaggtaggattcctggtatatagcattacttaaagaacactttgaactcttttttttttaatatactttaagctctacggtacatgtgcacaacgtgcaggtttgttacatatgtatacatgtgccatgttggtgtgctgcacccgataactcgtcatttatattaggtatatctcctaatgctatccctcctccctccccccaccccatggacaggccctggtgtgtgatgttccccaacctgtgtccaagtgttctcattgttcaattcccacctatgagtcagaacatgtggtgtttggttttctgtccttgtgatagtttgctgagaatgatggtttccagcttcatccatgtccctacaaaggagatgaactcatccttttttatggctgcatagtattccatggtgtatatgtgccacattttcttaatccagtctatcattgatggacatttgggttggttccaagtctttgctattgtgaatagtgccacaataaacataagtgtgcatgtgtctttatagcagcatgatttataatcctttgggtatatgcccagtaacgggatggctgggtcaaatggtatttctagttctagatccttgaggaatcgccatactgtcttccacaatggttgaactagtttacagtctcaccaacagtgtaaaagcgttcctactcctccacatcctctccagcacctgttgtttcctgactttttaatgattgccattctaactggtgtgagatggtatctcattgtggttttgatttgcatttctctgatggccagtgatgttgagcattttttcatgtgtctgttggctgcataaatgtcttcttttgagaattgtctgtttatatcctttgcccactttttgatggggttgtttgattttttcttgtaaatttgtttaagttcattgtagattctggatattagccctttgtcagatgagtagattgcaaaaactttctcccattcaataagttgcctgttcactctgatggtagtttctttggctgtgcagatgctctttagtttaattagatcccgtttgtcaattttggcttttgttgccattgcttttggtgttttagtcatgaagtccttgcccatgcctatgtcctgaatggtattgcctaggttttcttctaggatttttatggctttaggtctaacattcaagtctttaatccatcttgaattaatttttgtataagatataaggaagggatccagtttcagctttctatatatcgctaggcagttttcccagcaccatttattaaatagggaatcctttccccatttcttgtttttgtcaggtttgtcaaagatcagatggttgtagaggtattatttctgagggctctgttctgttccattgatctatatctctgttttggtaccagtaccatgctattttggttattgtagccttgtagtatagtttgaagtcaggtagcgtgatgcctccagctttgttcttttggcttaggattgtcttggcaatgcgggctcttttttggttccatatgaactttaaagtagttttttccaattctgtgaagaaagtcattggtagcttgatggggatggcattgaatctataaattaccttgggcaatatggctattttcacagtattgatacttcctatccatgagcatggaatgtttttccatttgtttctgtcctcttttattttgttgagcagtggttagtagttctccttgaagaggtccttcacatcccttgtaagttgtattcctagatattttattgtctttgaagcaattgtgagtgggagttcactcgtgatttggctctctgtctgttattggtgtataggaatgcttgtgatttttgcacattgattttgtatcatgagactttgctgaagttgcttatcagcttaaggagattttgggctgagacgatggggttttctaaatatacaatcatgtcatctgcaaacagggacaatttgacttcctcttttcctaattgaataccctgtatttctttctcttgcctgattgccctggccagaacttccaacactgttgaataggagtggtgagagagggcatccctgtcttgtgccagtttttaaagggaatgcttccagtttgtgcccattcagcatgatattggctgtgggtttgtcataaatggcttttattattttgagatatatgccatcagtacctaatttatttggagtttttagcttgtagggctgttgaattttgttgaaggccctttctgcatctattgtgataatcatgtggtttttgtctttgattctatttatatgctggattacgtttattgatttgcatatgctgaactagccttgcatcccagggatgaaaccaacttgattttggtggataagctttttgatgtgctgctggattcggtttgccagtattttattgaggatttttgcatcgatgttcatcagggatattgatctaaaattctcttttttttgttgtgtctctgccaggctttggtatcaggatgatgctggcctcataaaatgaattagggaggattccctctttttctattgattggaataatttcagaaggaatggtaccagttcctctttgtacctctggtggatttcggctgtgaatctgtctggtcctggactttttttcttggtaggctattaattattgcctcaatttcagaacctgttattggtctattcagggattcaacttcttcctggtttagtcttggactcttaccattgattgtgtggggattgtaaatggtgacaatctgttggtaccttggagagctcccaatagcctctatctttgatttgttaaggtgctactgaggctttttgttgtcttagctttaggcatactttataagctctgtcatcctggtggatctaaaaggtagttaatgcagctgtacttcaatttgctgtgttaggctgtgtggtactcggacattatctacattctgttaaaaccttttggccttcacaccagatcttaggcaatatttttgggttcctcaaagtttcctatgcactaaggaggatagataggcttatcagttcacaatgttggcacactttgtctccaggggaaagagcattttttggcacagacaaaagaagtattgccaagaacaaggtagcatatgctcagatccaattagtggcagagacaataaacacagtaagagttcagagaaggaagttgtttctgagggctatggaacaagtgaaaagctccatgcaatagcaggccctatagtaatgaaagcattcaggtggaagagggaattccaggtgaaggaaatggttaacaacattctattgatttcaattgaagaaaattacaaggcaaaatttttatttttaattagcctataatccacctgagggagaaaagaaccatgaaagcagaaaccaacattagatcaactaccatttatgtagtaaaaagagtaataagatatagtgtaaacttaataataatgtttaggagataaagccttaggaataaaggatctgtgttgggtagggttatttagggcactcttgatttcagttattattttgtttcttatattagtacttcattactatatgtgtctcaagtggagagttgaactcaggaaaacagcctcagaaagaaaaagaaaaaaaatactacatactgatctcagttatacatattttgataattaataatgtgaattgtttcaggcggtttattttttaccttttgtgctgcctacccactacttttcatattccagccagcctcttgactttggtgttctccattctgagagactgtccatacaagtatcctccattaatgtgaagtagagttgcttatacttacaaaaagtcctagaggatagaaaaacaatcaataatgggtgcaaataatagataaacactatttttgatagtattcagtaggtctcttaccaagttattttcagaatatctctaaaaaatattaatctagcatcactataccttagagttggaagtgcttcagagatcatctcatttaccccttactcaatcagatagccatccaacttgcatcacttctgtgattactaggttctgtctgaacattttcagatatggaaagcttgctacccccaaggaagccattctgctgttgaccaacacttagaaaggtattgcattaaactagaatttgtccctatgactttaaatagatttttccagtttctttccaaagaagctacaccaactgtgtcaattcatacgtttattcaacaaaatgtacaggtcatataatatatgcaaggaattttctgagccctacaaatgataacttgataaacatggatataatactgtcttctatgagaaggcagattcttaatacatttttttggatcagtaaatagatggatagatgaatctttttcaccattaaataatggtaaactcttgatatataggtaaagttggtgtattccttggtaagtgaaggatgtggaatgagcattttaatatcctaatatcctctagaatggtgatgtattttatttcatagcctatcagtgtaaaaaagaggcaaatacaatatttatatatttattttcaaattataaatatgaattacttaactaaagtattatgtatatgaactaaatagatgtttttaaagatttaacataagtatatatagctatatattttaatagtttatacagtgccctatataacccacaagtatgatttatagctttgttaattatttaaatatactgcctttctagaaaaccagcattttagttgtccattacatcttagttgttttcctaactggagtcaagtgatcacaatatggtagcatttaagatttggcttaagaacatattagaactcaccaagtttttcaaaaaataggctttgagacaatattaagaaacagagtacttcaaggaaagaagtgatagaagtaatttatgaaaaacaatttatatgaaagctttgtactttcaatataaaagtactatagaagtaaaacactataaagatggataaaaaggagaagtttgaaactgtcaagtaagctaaattccttatctctttacaagcctaataacccagttggaataactcatagagtataaatctgggatctcattaaaaataaatattttccagtaacacaatgatgcagaggcaaaatgtatgaaatagaaaataaaagaaagaaaataatgacttcatactcttcttacctattgtctgctatgccagtttggattaccacaccacaggtttagcttgagactgaactcataatttcttcccagactaatgtttccatgtgagtttcctaattctgtgtatggtgtcaccattctctgggtgtcccaggcccccaactttaaacttaacccctgttccccatttcatgactaattgtttaccaagttattttgattctctgcaatatccagcaagcaaattatcccatgtacttaggtacagtaaaaatttaggactgctaacaaccacaaaggtttgtgctttaagtttagttgtgagctctgaaaaatgttagagtattaagtgtcaaacttaagatggcaagtccattttcataatttagtttttagtttcaattttgaagaatctcatcaaatgtatatgtctcagaatacaaacctttaataatataattatttttctggtcagttacatgttttattgttttcttgatccttagacttacaacttcaaataaaaatgtaaatatctgcaacatttgggcaatattgctttataaatgaaactgtacatacaagttcagtttttcacttttacaaacctaggaaatgcccttgaagcatgaatgacagtgtttcctcaagaggttcacatcctattacagtagaaggcatggtcaggactcatgcctacactttcagctttgacccaccctggctttggatcttgggtaaatggttagtctcactcagaataaaacttatactagacttttcatgtcaatggtccctttctatgtctagctaacattgtgcctcatgtcctctattatccccatctggccctaattaggtgaggctgtatcatggcagcatagcttcgggattaagctctcaggcttgaagtcagattctttgggtatatgtccctgttctgctacctatggtaacaggacagaagcatttaatctctatgttttgttgtctgatttgtaaaatgaggtaataataacacttaatttatgggtttgttgtgagaataccacaggttaatatataaaagttctgaggactagcacataataactactatgtggttgctattattgatattcatataaagcactcagcaatgtgcctggtatatagtgtgtgctcactaaatattaactgttattctcattgccagactccacttcaatttctgtaagctttatttcagactttggtcacaaaacaaaatagatgaaagtatatcctcataacacaaatgcgtgttcttcacctcaacaaaccaaccaattatggcgtcctgagggagggtgtgtgcgtcaccttgcaatgttgtaacatatgcctgcaaaggactattctacaatacatggctcagtaaacttacgtttttcttaacagctgcaaactaagatttgttttgaataatcctattagtttgtgccagtgttactgtgaaagtgcatattcaaattcttggcctttgttttacctgttagctttaatgtattttactttttaatattataatctactaaaatctaaaaatatgtgtattaatctgtttcatgctgctgataaagacatatctgagactgggaaggagaagaggtttaactggacttaccacatggctgcagaggcctcagaatcatggctggaggaaaaaggcacttcttacatggcagcaacaagagaaaaatgaggaagaagcaaaagcagaaacccccgataaacccatcagattttgtgaaacttattccctatcacaagagtagcacgggaaagactggcccccatgagtcaattacctccccctgggtccctcccacaacatgtggaaattctgggacatacaattcaaattgagatttggattcagacacagccaaaccatatcattctgtgcctggccccaccaaatctcatgtcctcacatttcaaaaccaaacatgccttcccaacaatcccctgaagtcttaactcgtgacagcattaacccaaaaatccacagtccaaagtctcacctgagacaaggcaagtcccttccacctatgagcctgtaaaatcaaaagcaagctagttacttcctagatacaatggaggtacaggcattgggtaaatatagccattccaaatgggagagattggccaaaacaaaggggttatggggcccatgcaagtccaaaatccaacggggcagtcaaattttaaagctccaaaacgatccctgactttatgtctcacatccaggtcacactgatgcaaggggtgggttcccatggtcttgggcagcttcacccctgtgactttgcagggtacagccctccctcctggctgctttcacaggtgggtgttgagtatctgcgacttttccaggcacatggtgcaagctatcggtggatctaccattctagtgtctggaggatggtggccctcttctcacagctccactagacagtgccccagtagggactctgtgtgggggctccaaccccacatttcccttctgcattgccctagcagaggttctccatgagggtgccgcctctgcagcaaacttttgcctgggcatgcgtgcattttcatacatcttctgaaatctaggcggaggttcacaaacctcagttcttgaattctgtgcatctctgggctcaacatcaagtggaagttgccaaagcttggggattccaccctctgaagccacagcctgagctgtttgttggctcctttcagccaaggctggagtggctgggacacagggcaccaagtacctaggctacacacagcatagggaacctgggcctagtccacaaaaccaccttttcttcctaagcctcaaggcctgtgatgggaggggctgctgtgaaggtctctgatgtggcctggagacattttctccatggttttggggattaacattagactccttgctacttatgcaaatttctgcagccagcttgaatttctccccagaaaatgggtttttcttttctattgcatagtcaggctgcaaattttccaaacttttatgctctgcttcccttataaaattgaatgcctttaacaacaccaaagtcacctcttgaacagtttgctgccttagaaatttcttccatcagataccctaaatcatcctttttaggttcaaagttccacaaatctctaggggaggggcaaaatgccaccagtctttttgttaaaacataacaagagtcacctttgctccagttcccaacaagttcctcatctccatctgagaccacctcagcctgaattttattgtccatattgctatcagcattttgggcaaagccattcaagaagtctctaggaagttccaaattttcccacattttcctgtcttcttctgagcctttcaaactgttccaacctctgcctgttacccagttccaaagtcacttccacattttcagatatcttttcagcaacgccccactctactggtaccaatttactgtattagtcctttttcacactgcttataaagacataaccaagactgggaaggaaaaaaagtttatttagacttacagttccacatggctgcagaggcctcagaatcatggtgggaggtgaaaggcacttcttacatagtggtggcaagagaaaaataaggaagaagcaaaagcagaaacccttaataaacccatcagatttcgtgagacatattcactatcacgagggtagcatgggtaagaccggctcctgtgattcaattacctctccctgagtccctcccacaacacatggaaattctaggagatacaattcaagctgagatttgggtggggacacagccaaaccatatctgtatgtgattagataggaagcttgctctaagttggtagaatgtaatttaatgcaagagagtttgagttgaaacagtttgagataaatatgatttatattacaaatattttacagcaaactttttcaatttgtcattattgaaaatgtttcagataaaaatgaaagatgaagagtctattgactcttttttcttaagctaaaatagacaataccaatattaatttatatatagtatgtatgaatgttacttttgctttttgatatgaaatataagtcatatgttactataataataagcactactgacaaagtttcttcttaattgtaatctttacagcataatgaattcatcttcctacatctagacatgcaataatgaaatattttaaatactgaatttaggatgaatttgattttatatatgcttaaatttgaaataaccactttcaaatttctcacccagtgattataacaataaatgatctttgctagatatacaaaggtactttcaagcaatattccttttgttgcttaccacaattatgaagtctaatttcagaaatctcagattaagtgggatagtcaagcatagtgacagaattggtatttaaacctggactgcttcaatgcctaatctgttgagggtttttttttttttttatcatgaagggatgttggattttattgaaggctttttctgcatctattgggatgaccatatggtttttggttttgattctgtttatggggtgaatcacatttatttatttgcatatgttgaaccaaccttgcattccaggaataaagcctacttgattgtggtgaataaaccttttgatgtgctgctggacctggttttctagtattctgttgaggatttttgcatctatgttcatcagggatattgacctgaagttcccttttttcagtgtgtctttgccagattttggtatcaggaagatgctggatttgtaggatgagttagggagaagcccctcctccttgactttttgaaagggctttggtaggattaatatcagttctccttgcatgtctggtagaatttggctgtgaagccatctgttctggggcttcttttggttggtagtttttgtagttttttaaattactgattcaatttgtgaactttttattgttctgttcaggtttttgctttcttccttattcaatctactatttgactcagcaatccactactgggtatatacccaaagaaaaataattatatcaaaagacatatacacccatatgttcatcgcagtgctattcacaatagcaaagacatggaatcaacctaggagcccatcagcagaggataggataaagaaaagtggtacatatacaacatggaatacgatgcagccttaaacaagaatgaaatcatgtcctctgcagccaacatggattcagctggagaccattatcataagtgacctaatgcaagaacagaaaaccaaaaactgcatgttctcacttataagtgggggctaagcatttaatactcatgaaagtaaatacaggaatgatagaccctggggaccactagaagagggagggagggaagagggcatgagctgaagaaccatctgttggatattatgctttctgcctgggtgacagggtcattgggaccacaagcctcaaccacaggcaatttacccatgtagcaaacctgcatgtatatcctttaatccataataaaagttgaaattaataaaaataaaataaattgtacaaaaaaacccttggacttctaatgccaaagactacatttccaggtatttaaagtaaatagactaaaataattgattagagaattttaggtgagaggaaaacaccctttctctgtggattaataaaaacccaattaatattctttctttttattctcacctctcattcctttatagagaagagcaatggaaagaagaagggagcagggaaacatggtcaaggaaggaaagtgattctcaatcaggagaaaaggtagctctcactggtgaaaatttggtgcagtacaaccaaaatacaaaatccagtttacaaaaaatgaaatatttcagtgacccatatatttatttttctgtgtttttctgcatgggtttgggttttttccctattatttcagaattgggctgtagcctgcaagtaaattaaagaacacttgttttcatttttaattattgatcagctgtctctaaggttcatttactattaatgcagaggtagaattgtgttttttccatactctttagttcttgatgaaccccatatggttctggtgctcacagctcttcaataattcaagattatcatggaaaaataatcaagttttgaaaatctagatcagtggttttcaaagttttttctcctgtcaacaatagaaatattttttttctagttaaattatgatctggactcaaacttttaaactgtgtttaagtggagctgcttggcttttgtataagaaggaaggtttctccatgactcaattaactttccatcctctccggtgaccccagaggtagctctttcaaaggttggggctcctgttgaacagaatttgaagtacactgagatagatgaaaagcagttaggatgtagctcaggctgagttctgagatagagctgatctgggttcaaaccatgaacctcaccatcaactaggcttgttaccaacagcaggtagctgaacttctctaatatcagtttcctcctcagtataagtggggagaaaataatgcccacctcataaaactgttttgaggattgaaataatgcataagaagtatttggcatgtattgttacttgtgtcagttaataatctcttctgagacatattctatagtgatacaatgttggcagtatgatgaagccatagagataatgctactcagagtacagactgctttcttgatgacagacctgaatatttcaaattataatcctaggaggctatagtttatgcttttttccaactctaagatttgtataaagacacatataaagtgtatccattttgaataatacatttaaagggatactttatcccctaagatgctgcactggtgaaaatccctaggataatgtgtaatcttctttgacagtatgtgcacgtaaaatagtttcacaagtgcaagatggcaaatgtaatcttcccatgtgcaaatagactttattccattgagggtagagtctctacagctgagttttttaatgccatggtatcatttatctaattttttttttttttttttttgagaaggagtctcgctctgtcagccaggctggagtgcagtggcgcgatctcagctcactgcaagctccgcctcccaggttcaagccattctcctgcctcagcctcttgagcagctggactacaggcgcctgccaccacgcccggctaattttttgtatttttagtggagacggggtttcaccgtgtcagccaggatggtctcgatcttctgaccttgtgatccacccgcctcagcctcccaaagtgctgggattacaggcgtgagccaccacgcccggcctcatttatctaattcttaataagcaatccattttgctttgtttcttctctccctcgcttccttctcttcttccttgcttctatttggtgccaaacaccgcgttttatttatgatattaaaaagtaaagtgagtgtgatggtggctggtcacccattgttttgaattaataacagaaaaaaagaaatattttagtggcccatatgtttatttttatgtgtttatgtatgtggttttggggttttttagtgccttctatccctagaagtcactttaatctcaagactgtccaaataaacttttcagcaaaagcatcaggtgagaagtctgggagaaaccatcctataaaacaatatgaacagaatggagcagtgaacacaatgctcccattctttctctgtcctccaagccatctttcttcttatagactccctgccatgtgttgcctggctcaggttctacatgttcatcctgccatattggcactggcttctttgaattctgctctagttctgagacggtggcgctttattcactactaactcccaggaccagtgcatgctattcttcaatttattgtgtagattaaaaggtatcttcttaaaaaatgatgcatgctgctgggaaatacagacactttaattttacttagaatcttacttggaatgtgttagtagccagataaacaagcaagactgactcaggaaagaagccagagaaagggtaagtgtgtcaagcaaaagtagacagcagcaccaaattgaaaaaaaaaaaaatgagaggaggagaagaggctaaaggtacatctccttttacttttctttctttctttctttcttttttgtaattttgctttaagctttccattcaaattatcttatgcttcttggactagctattaatattagacttatggttgattagcatttcaaagagatagaggcaatgtatgatgattctgagtcacctactccattgaatgacagcttgactaacccagtgacacatacaggtctcagccacacccctatcctgaacgtgtcttctcagaattctctcccttaatcttgatctttgtgttcttctttgactttccattttatgtctcttttgcctcttgtaatgaattctctgttttcctaatcttcctccttacctctttcaaagtctgtgtatttctttctccctctttgtgagtgagctttctctctctctttttctctaatattttgcatacccttaattcttatctgtacaagccatggattttgaattatatatttgaaatattaactgcagctatttaataaagatttacaactctaggtttctgttaaataacaagtagttgaaagttaaaaatttcacattttacaggagaggttttttgctatgtaagccacttcttctttggactttaggtcagaatatttaagtagaaaaagaactatcagttctaatttaagctgttattttaatgttatagacagtaaatttaaattattcatggcattatggaatattcctgggtttcctgatcctctagttttaggctacagtgtttcatgaactggcttaactacaaaaaccattatctaaaatccataccaaacattaaaagggcagaaaaggggagaaggcatacagacattgaaaaattctgcacaaacttcagcctgtaagtgctttgaactcacacacaacctttaatgttttccttgcattctttgaatgaacctcacttttctgttcagaaccctagcatgtctaggaacttacattgcatgtgcttaatcatggaagtgaccatatgttctttttatttctaactttatttggctctgtctgccctgactttttcctctctggtcataaagtttttatcttaccattcagtttctcccagaaagcctctgaaccagtccaactttgttatttctgtctgctccccgagtccttgatggaagtgtgggtgaggatgggggactgtttaaacttttcccttttaggttaccatcttatctccttgctctcccagtatcaatattctctctgctagagagcagcttctcaacctacttgggtcccttagggatgtctctgcatactaatctttcagtacttatctgcaatccattacttaccctcattaaatacagtttggatcatttcccagagtcaatggcaaaaataaaaaggaatttttagtttaattaaagactggcaccattttttaattaattttttgacaaatagtaattgtgtatatttatggggtataatgtgatgttttgacacatgtttagattgtggaatgatcaaatcagagtgattagcatatccattacctcaaatatttgttatttctctgtggtgagaacacctaaactcctctcttttagctattctgaaatatctgctacattattattaactaaagtcatcttcctgtgcaatggaacaccagaacttattcctcctatctaactataactttgtacttattgaccaacatctcctcttttcctgttcacttcccaactcccagcctctggtaaccaccattctcctctctacttctatgagtttaacttttttagtttccacatataagtgagattatacagtgtttgtctctctgtgtgtggcttatttcacttaacataatgtcctccaggttcatccatgttgttgcaaatgacagaatttcctgtttttgtaaaggctgaaaagtattccattgtgtgtgtatatatatgtatatgtatatacacactttaaaattattcatcagtttatagacaaaagttatttccatatcttggctataatgaatattgctgcaatgaatatgggagtgtagacatctctttggcatactaattttaattcctttgtgtgtacacccagtagtggggattgctggataatagggtaattgtatttttacttttgtgaggaacttccatgctagtttccaaagtggctgtactaatttacagtagcatcaataatataaagtcttccccttttttccacatccttaacaacatttgttatctttcatcttgatagtagccaccgtaacagggtgaagtgatatgtcattgtggttttaatttgcattttactaatgactagagatgttaagcactgtgggcatttgtatgtcttcttttgagaaatgtttattcaaattccttgcccatttttaaagttatttttttccttgttattgagtagtttgagttccctgcatattttggatattagccccttatccagcatatgatttgcaaatattttctcctaatctgtgggttgtctctttactccctgaattgttttctttgctgtgcagagttttttggtttgatgcaatcccatttgtctatttttgcttttattgcctgtgcttttggggtcatatccaagaaatttctgcccagaccaatatgggtactctcccctaagtactttttagtagttttacagtttccagtcttatgtttaagtccttaatccattgtgagtttattcttgtattaggggtgagataagagtccattttggttcttctgtatgtggacttctgttttctcaacagcatttattgaagtgactgtctttttctcattgtgtgtccctagtgcccttgtcagaaatcaattgactattgatgtgtgggtttatttctgtgctctctgtcctataccattagttgaggtgtctgtttttacgccaatatcatgctgctttgctgttttgattactgtggctttgtatattattttgaaatcctgtagcatgacgactccaggtttgtcctttttggtcaacattgctttggctatttggagtcttttatgattccgtacaaattttataattgttttttctgggccaagtgtggtgtcttatgcctgtaatcccaacactttggggggccaacacaggcagatcatgaagtcaggagtttgagaccagcctgaccaacatggtgaaaccccgtctctactaaaaatacaaaaagttcgccgggcatggtggcgtgacctgtagtcccaactacttgggaggctgaggcaggagaatcacttgaacctgggaggtggaggttgcagtgagccaagatcacaccactgcactgggtgacagagtgagactctgcctcaaaaaaaaaaaaaaaaaagaaataattgttttttctatttctgtaaagaatgacattgggattttgataaggattgcattgaaactgtaggtcactttgggtaatatggaccttttaaaaatattaattcttccagtctataaacatgggatatcttttcatttgtcatcaatgttttatagttttcagtgtagagatctttcactttattggttaaatgtagtcctaaatattttgattttttgatgctattataaataggattgttttcttatttctttttcagacactttgctgttagtgtgtagacataccactgatttttgtaagttgatttatgtatcctgtaactttactgaatttgtttttcagttctagtagttttttttggtggagtcattacgattttctttatataaggtcatgttgtcagcaaatgaagatgattttacttcatcatttcctattttgatgccttttatttctttctcttatctaattgttctggctagtacttcgagtgctatgttgaaaagaagtgatgagagtgggcatccttgtctttttcctgatcttaaaggaaaagtcttcagctttttaccattaaatatgatgttaggtgtgaatattggcatcattttcaacaataaaaatgtttttaaaattttatgttgtggcaaaaattggctatgcaagatatttttatcattttataaaagattatggatcaaaaaatattaatgaaaataaaacaaaatatattaaagcttcctctattatctttattcaacttaggtttaaattgtatgataaattagaaatggaagatattaagaaaataaaaggctttatagaacttttgtagaaatttgaaagatttgcataatttgtatagagtaaaattggggacagttttccatgaggtcataagtacaggataggagggcattaaggtggtggaataaaattggtacatactggtatgggacataattacagcaaaatgtgtgcagggggtaggattcatttattcagtcagttggacagtcaattatatattttacaaattgtctagttagtgttattttgtgccagtcattatactaggttttgggatttcagtggtaaataaaaacagacaacatgaagtataactgtataagcattcattgagtaataacacaataatttaatgattatgtatgtgtttggcaggaagacaaccgaagccatagaaccacatagcagggggtcttgttatgcagagtgtagaatcagagatttccatgatgaaatgatattgaattaaatattaaagtgggagtgaagagaacatcctttctgttttattttgagattggcaaccctcggcattcttaaagttcaaggggaaggattcagtacctagggaatagtagaacatatggaggaaaaaaagatatctgcaagatatctgagatggtagaaataggaaatgaagttgtaggattttgtggtggggaagcgggtcacagtttagtgctttccttaagacaggaaaagatacttgtgattgttttgtaaataggctcttgaacagggaggaaactggtgaagctattgctttaagaatggtggcaatagattgttgagcgattggaatagcttaagagtgaaagaccaggtcaagtggaagatagctgcatctaagcagtcattgagtaataaggtcatgaatcgagatagcttaatgtccacgtgaaaattatcttctatgttttctgttttcgtgacatgttttcactcctattttttttaaaacaaaatgcagttgtgtgtatctcagaagtcctattcagtaaaaattttccctatactctcaggaagagttttattgcaactcccccagaatcccacagaatttgatttctacctcttagtgcacactctatgaaacaatgaattgtttatgttcttgttacctgaataaaactgataatttctcatgggcttggagagttgttatttattttttatagcatacacaaggcagaatttggaaaatattggacacacaatagataacaattagatattgttattgattgactgagtgcctagatgaagagaatcaacatttgcattttttatattttccacaggtagcctgtcttgttgcttttcttcttagtgtatctttaagtaaaagacttcataatttggaaaatgccaatacctttattgttgaaatcaattgcatgcctaaagcagacagattaactgcttttcaagacatagagaattcatggtaactggtttatctaacagtattattattcagtttcagaataatacataccaaaatatgttgtgttttcccattcttagtggctgttctaacaggttcaccaacaacgttgtttacttctctctttctctctcttactttctctcatgtctctatatatctataatctttctatctatccactgatctataatcccatgtatatacatatatgtaccctgaagcgagataaacatggatttaaatcgtgttgccttaatttaactatgactcagaaatgtcatacagtcactgagcctcagtttctgcatctgaaaatggtaaataatttctcttatcttgcagactttaagacaggattagaaataacatcttgtgaagtatttaataattggtagacaattcacagtggctattattttggtgtatactttatggtactcattgttatgtagttgtatataggcataaatggttaatgctattcataactgacaatgtattctgatcctttttggtggacaactgagagaaaagtctgtggtttcagattctgcccctttaggaatggataattgagaggaaggagccgggattcttcattcctctccctccattagcatccaaactggaaccttcatgatggaggataggatggattctcctgttagagaagatagttgcaccatctgaacactggttactcaggattctatgtttatcttttaactttttcaatgaggacgactattgtattggcagaaagagtgctttttgatatggtttatgtatatgcccaactcctaatgcacaaacctgttagtagagcacattcaggatactcaagccctgactactgttgaataaagaaacaataaccctattttatttagaggaaccacctcaaagtctcttgcagtaatgctcaattctcttcccttcctaactcaccaggaagaagggggctggaggcacaaatacatgtttcttcccactcccaaagagaaaggctgtgcagtgggagtaggctagatgttacaattctttgctccattaggggattaaaatgacaggtgacacttctcttttataagctaggcacctaggaaaaaaaggttgcttgttttgggtttgctttataataagaagaatatgctgaagcacagggtgctagaaaataaaagatgggtaagaggtttgatgaaagactgggaataaaagtagttgcatttctagaacagcatgaaaatgtaatcctacaatgtttgagattgccatggatgaagttttaaagaagtgactttgctcaggaaattaagtttttgatcaaggagagtaaaggttaagaaagtatttgcaatttggtatcaggtttagagaagacttcaagtgttatagtatagaggccatttggaaagtcaacccttagcctaaagtatggagaaaggggagggagaggagggcttttaaaaggaagtaggaaagacaaaatcgtatcttgctcatttgataattttgcctaaaatctgatgggactgatcttagcttagtggccccatctttttaaaaacgtttcagcccatcttttctggaattggtaagattggaagtggatagcagctgggcgtgtcttcaaatgatttgttgttgaacagaataattccttttctagaactaacccatactaaggtgttgtatagaggtggagtagggtggtgatagctagttatttattgggcaaacatgctaagcaaagtagcttagaaagtataatggcacaaagataaactgttggcttacttcctgcttagtgaaatattgtttattaagactcaattcatagttggcttctattgattttttaccatccagtactcaaagatgtgcaaaaatgttccagcatttgctcaataatcaaatgatcactttctttgtattgacaatctctcttgatgttagtttgttccacatgtcatccaaggctgacaatcgttatagtagcctcaagtttttcgtcattacaacttcttgacctctctccttctttctctttctccaacttaagacccaggtatatagaaccatttgcaacttctacaacatactgtcattgcttatactttacccagtggttggaacattctaacttacttcttcacttgcctcactctactgaattctcaagacggggctcaatgtcctataggaagcatggccagttgcaggatgaagtcaaagatagctgtctctgctacgtgctccagttagatttctgtgctttgtaacagcattaatcacaacatatagcatgtcattttcctgctcctctctttctgggtcatgaataacttgaggaggaagaatctattttacttttgctttgaaatacacacacacacacacacacacacacacatacacacacacacacacacagaatacctaatgtatgattcaacataatgtctggcttagtaggtcatcagtaggttcaaagaataaatgaatatatgaattgcaagtgctttgcataatggatatgtaataagtaactgttaaataaatgttttcaaaggagttactcttcttgaagaaagcaaacttcttgattctatttttattacaaaagtttaaagatatatttaatgagacattttcaaaggaaatgccataaatggaggtcattaatcattcactaattccttttcaaccaacttcaggtgattgtttcccccaaatcaaataaatgttaaaattatttgtatagctgttaaagtgattgatataacttacatttaaatggaagaaaagtgttttgatagtaacattttcagccccaagatagcatgttttcctcatgtgttttccaaagaaaggaagctagattactatgacttaatttataatatatttcaacattgatggatgaaaaaataatgaagtgtttatttacctgaagaaagtaaattcaaggtccaatatatcttaatatactgatttattgcttatgtaatgtataatattaattatgtacaactgcattatacaacatacataatggcagtaattatgttcgtgtgtctgaaatacatttttgaatgaggtatttatttattgaattcaaagggcagaacaataagttaaaagaaagtataaggcatggccagagctcggtccagtttccagcatacaacaagctctccataaagcataatttctcttttaaggatattgtccttaaggcagtgtgctgtggtagtgttgagtcaagcagtctggacttaataagacgtttccctggcattcaaaagtttttgatctgttaaaggtagaaaaatttttattaaaaagactattttgtattagccaaaaggggatataatcgttgttaatgtaaaaatagatatgatgtattacttaaaaatttttgactctctaatatctttcaaatttccaacaccaacagtaatataagtccagtaagccatgaatcaaattggaactgtacttcagcaatggtgtagttctttgcagtgcagtctattatgttaagtagtttcttaccgtatgaaattcatgtgttcttttcataaacctaggattataaaaagtctaatgtgatgtgtgagtttaaggctatgaatccagctttagggaggtctcattaaggaaaaaggggacagatggatccatgtgcctactgtgtgttatagtgcctactgagtgcttttggaataaaaagatgagtaagtttgagccttttaacaatagctacttcccttagaaggaggaaaggaaattacagaatacctctttgaatttttgaccagttataaattttttttaaaagtgaaataaagaagttaactaattggatttgcttcactatttcagtcaatctgtgttgaatctttgagcaaaactggttgagcagcttacatgacagctctccaagtaaatggaaaatttcccaagctcatgctggttaggaaacagaagtcctcttttaaagcagtgcagaactcagcagtttgggtttcattgaactggcttagtggtttcaacttatataacttccatatggaaagttaaggggaacatagaaaccaaaccctcttattgtaccacctgagagcagctgctctttcgggggtttctggtacattgcctaggaccctggagatcttttatttttcctaaaaatctggaattctgtccaaagaccaacgaaaccatgaaagtcaaacttatgcaaactaatttctaatggcagtgagaggaggaaatccagtttaatctcctttttaaagtgcacaaacacttggaactgtttgacctaacagtcagcaaagggtccagagagaaccaacacaaaacaggcaacaggattgtgttctctagtaaatcatggatggtgaaaaaattttgtttttcttttgaaatagtctagaggcaaatgagaatattaggctgaacactgtaaattacagacaactaggaaccatgattggtaaggactaaagatgcaattttgaaactaaaacaaacaaaaaatttatgtctcacttggttatgggaggacattgagaatcaatgaaggtctgtcaagtattatactaaatgtattatactaaatgtattatatgtgctttgtcatctaattttttatcacttctgtgggtaggaattatttcaacctaatttttgcttctgaagaaactgacagagagacggaatgtgtttctaaaggactgaaaaggggtgaatttaggatcgaatcctaggtgtgtttctacctgttttaaacatactgctttctattttgaggtgtttataatatttcttttaggtatatgaatttacaaatgccaagagtgggttgaaccattcttaaaatattgatagtttcataaaaaatattgtaaaaatctttacatgcctaaaattgattacttctctgagaaagtttctacatgattgaatttgtgtggccgaatgaaaagacatatgttttagaagagaaaagtaatgaatgattgatgattgtgcagtgtttctatccagtgatttagaactcagcttgtttgaattgctttagcagagggatcacaagcgatatatattttttaagtaaatgtttaaaacattggctatatctttaattagagaaaaatttctggactcacgacgagcacagaaatttgagaaaattagtgtaattaaaactcagatgtccagcaagtttgtattatatttcttttgtgcttcataagatgtgaataatattttccaaataattaagactgaatgttaactctgtgagaaaaagaatttatttttagaaatttgaataagaatctccctttaaaatccacatttccatgccatatgtgatcattttatgagtaaaattttacctttcctagaatccaagatcattattataaacatcagctactgagttactctgttaactgccattgatacaatttttacaaaatataaacttgagtaacaactggtcctagatttaacaaacagaaacaaaaattacccatttattgtaataatgacatatttttaaatcttctataactggaataaaataaccagccactatatgtatctgatcctctgcattctcattccaactgcatgatgaaggtcaaactcctgctcaatgcatgatctttgtcacgaggtggagcttaccaggacttatgactgtttacaaactgacctttttctcctttgacccctatctttttcttagtatatgtgctgctgaagtaagcattctcctttgactctttcccttcattttattattatttttttcaatttttcttttcaattttttgtgggtactcccttcattttagaatctcaaagtagcacttagtcaccaaatgtctgtttcttctgttttgaagtctaatctaactcctctggctcccctgagctaatgctgattcccaaagagaaggcacccttaactcaaagttagaaatataatcaaagtccctaagtttcctcaaatatctctttctagcatgtctttctgaactgagtcttatcagaaatttctcctgcaaaaatactttcctggcttgtacttcctaattttattcaagaatgtagcaggaaattcatgaagcattgatgaagtgtctattatatggaagatactcaggttcttcaccacaaagatggctaagacgcatgctcatcccccaagatgcccatgttaaagtggggggcagggacataaagatgtaatatatatatagatgattgtgaaatgatatagacgagattcaatcaaagaaaagatgttcttgaaaagcaaatctcccaccatgattaagagtctgactaagaatatgggaatgaacgtgataggcagtgggctgagagatgtgcaaataaatgctgtgttctaggaaccatgtatagttaaataaggctgagcatagacatgagagagatggggagtggaaggagggcaggctgtaagggtgagaaccataccacaaatgagaccatgctagggaatcagacttgattttacacatgatgggctgcttttggagtgtgtttattttagatgaattattctgtagcaacagtgcagaagagatatttgaaaggggcaacagtggaggcaggaaaaccagttaggaagtgattgttgtcatctgagctggataggatgaagctttagattgggtccatagcgatagagatggaggagagaaaatttagagaaatatttattaaatgtacgtgatatggagagttctaaatgtttaccttgagcagcaggaacagatgcagattttgtggggcctgaaaataaagtaaaattattaattcaaaagcaggtatgaaagtaaatatttatttaaaatgagagaataaatcacaaggttacacactttaataaaatgacaagccacaaacctcacaaaattgagaaaaagaaatgtattttatataagcacaaactcagtatttcttcagttcaactttcctttagccatattccaaaactatctgtactcattctaatatctcccaacgtgaagaaatatgatagagatgaaatcagaattcaaagagaatcaggagtgagcaagatacatcccagaacctttgttcctggtggtaaattaagcaatcatgtctggcgaaagtcagcacttgttatttcttatctgcgtaaaatattttccattttaaaccaagaagactctgaattatcgggaattacatgtttttggccataagagtggaataatgactgtaatcattaacagtaaggagtgagggaggctactcaatgaggaaagaaatgtgtaacattgcttcacttaggaatattatccccctctgctattcactcttttagtgccttcctgaatagaatatcctccaatattcagatacaatgggctctagcatactctttaagaaccaaaatcttgaaatctataatgaatcaatgcagataaacttttctgaactttaattagatttttatctatttgatgtctatgcacagaaacaagatagcaaaactaagaataaataggattttataaattgttttatttaaagaatagcaaatattaactttagagtattaattcctgtgatttccttgatattttttaagacaatcagtgattcctatgagaaatgtggcaagactggtgaaacatgccatcttttaagctttctgttcttcctttgagagacagcccagcatagggattaatgcaggaaccatggagtttgactgatttagttggactccaggctgcttactggttatattctacttaacctttatttgcctcagtttcttcatctgttaaatagggataaaatgacacctaccttactgggttattgagtggattataggtgttaatatatgaaaatatcttagaagcaatgcctggcttctaaggtggctgttattgttgttatccaaagagaaggaaacataattttccttagactagcctagaagtccctgtacaactgagtcagtcagatctccagactttattcctagctactataccaggtatgctgagctccagcccagtgttgctcagtgtgttccatatggatgttctgagataatttgttatgcccagtaagtgtagagctgaattaaatattttagaggtggcagaaagttccatatagtttttcatgctttagactcataactccaaggctatatggatggtctctgaagatgatggggcaatatcctttctatctgttaccgtgagctttcactgaacatgaccataattgactgtgctaagactttggcctttcctacttttgtggtataagttcagaccctttgaagaagcagttcataaatgcaattaaataaatttcaccccaacattagctgtcctgtcctgacaagggaagtgttgcttgtttacttagcacttgtgtcttgttaatactggtgatggccatctgtgggtatgaagagctaatggctgttaagtgacagacgaatcatttccacagagcatgcatacacgttctttctttggatggcgtctacagtttgtccttggcagaccattgctattttcagacttgcttccagtatcctcttgtatgtgttgcctcacagtaacttgtcacttcacttaagcagaaagctcacggttctctcattgctgtacctcctgtactagcctctgaatgcaatgtttgggtgactgccattatcacttcctttggcttttgatcactaaacttccattatccaggcatcacttgtatttatgagtaaacttttccttttgcaccacccccatactccaagtcttatagatgagccatttcctgacagctaaggagcaatcaactccactgtcctcctacataataatgaataatcttttcttgcagtcaataaaacaggctcccacgatcatatccttttatgacttggggatgctggtgaaaaatcttgaccagatattatttgatttgggagaatagagcaatgtaaatatggcattcaatatgctttaaaataattatctggaaggtgtaactttcatgctaaacatgatttacactacaaagaaagtagtctaggagaaataaaccacggaacttgtgggcattttgtaattgtctaatctagctcctttattttatagttgtggatgctggggccaagtagagttgactttctcaagggcacatagtcaaggagcagtggagatgctggaatagagtcttctgattcacagcctattactcttcattctcggatgttttataactgataatatctttgaaaatatctaaatatttttgtttgggaggctacttgagatcacttccttttcactgataggtcagaggacacacaagaagtccactcttaacatatcagtaagtgagtgatggatgaagtgaagaggtaagtgtagacacctccatttttaagttacattgttggggagatgggaagaaatgcttaatgaattagctctccgtctttagtcaatctatctactatgatttatccagtaatgcattggcccccggaacttggtgcttttacatctagcacatctccatatcttatatttgagtaaacttttaaatatttattaattgttattctgagagtggaaatatcgtaagtgtagaataaggagattaggctctactctaaattctattgtgaacctgaatcctaatcatgacaaagtcactactctttgcctcagtttcttcacatgtaaaattgaggtgctgctttaaatagcatcatctaaaattcatttcagatattgtgaatggaaaagctacaatctctgaatgttacaactgtcaggtcagttaccctcatggatttcatacatttcccatgcctggttgttggcagagggaaaagagtgggagtgtggtgtctgtgttagtattgccagctgatgggctttaaaacaggagtagtatggtttgagtaacaaaaataccttcttaggatgcctcaccaaataatagagggtgctgaagagagtatctaagtaagagacctggctatttctggaggtttttcaactagacctacgtttaatatttaaaaacatgaaaactcatgtaattaacatgtaacttatttgtattaaaattagtatgctgacatgatattttctaaaactgggccacatatgcatggatttcctaaataatccttcaagagaatagagcaggaaatgaagtgatatgcccatttgcagtgtggtatggggcttcctgaatgtataaatgtggaaggcagcaaggtggggttggataccagtaatgccaagaacttaatttcagcatttcaaccaccgtgtacatcctcaaaatgcctttcactttaattttgtataaatacgaattggatcccgggttaccttttgctttagagatgaaaaaaatgtatttacgtttcccacacaactgctaggaattaaagtagtgtgaaaactccacacaaataaataatacatttaaaactatttttagaagaataattcaaaaagacagtagttttgggacataggcaacaaaaagtcccttttacctaggtttctttgattcagagattcagcatacggatttatggagacagattatatcctcaacaaattaaagaatacaggatatacactgttgtctaatataatatgaggaaactttaaaatttatttccatgaattctatgttcaattggaaatatatgttcaattgagtatcagtagaaaaatctattgtttttactaatgactcagctgcttaaatgatctattgtatcggtggccagtggcaggaaggaggctctgtgcagtattgttgtaaccatgacattagtgacatcatttagcagaaatagaatttgggacatttggaaaacaaagcagtggcctcttggctcaactttgtgagaacctaataaattctaagaaagtataatggacagtgttgatttctccatatatatttagtgattttacatgtatgcacacacacacacctacatacataaagtatttcatttaaatttacctactaatgtatgatattcgcaatgccgtatagactttgggaagaatgttaatcttgtattgcaaagccatgctctactttaaaagcaatgcctccagatgtacagcatacttaacagggccaagaaaacatgtaacgttgattctgttctgagatacacctttgttaaaaagaatcccttcagtttttcctgtctgactaaaaatgatgaaaggcagggtatcctgaatggctgtgttagaacatcgaggtattggagatccgtgaaggagcatcatcgttactatagaaacaaatgctgcccctgtcatggacatccaaaggacagactgaaaaatgaggaagggaaaagcaatgggaggaagaggtgccatgaaatgagaataaagaaactacacaggaaggactgaattaagaaaagaacagcctgaggcagagtgaggaatctagacacagaaaattcccaatggaaatgtaaaaaactggatcaccacttgtgtgggtacaaagaaatgatgacttttctgtttttaaaagttaaattttcttctaaagtataagtatgtttttgcctttggaacaactttttgtatcctgaagtctctcttatggcacatgtatacatatgtaacaaacctgcacgttgtgcacatgtaccctaaaacttaaagtataataataataaaattaaaaaaaattaaatttgaaagaaaacaaaataagtgaaagtattgaagattgtgatagaaaatgtgtttgaataatgagtattagaatctgtgacaagtcactcgacctcaccttaaaatagggaaactaatagcaacctcatgattattgggtcagtataggagagaaccaaattcaaaccctgctccatggagtgaacatttctattttgggggaaagattagggaacggaatctgggaatataaattattcattttagtatttcagaatgaagagaaaagagaagatttcttttcctttattcctctcgctgaaaaagaataatttgttcatgtttgaagactgtgaacagaggtagaaaacatttattatatatatgtaaatatataattagatgacagtttacaaagtgaatgaatagatgctattaaaatgctacttttgaccttcaaaaacatctcaaatagggttgatattatttggttatttgctgatttggataaattgccaagcagaattttatatcaagaatagaagatataacgtttttctataacatttgatatgttttctggaaatgtttacttatagattattatcactcatgtattgtggtagacaaggtgatgtagcatccagatacctcttaaaagaaacacttcccagctcctgcctttttatccaaagtcatactattcactccttagggcagcctactttcatagctgatgaaggttggggtataaaggtatggccatcttctgaggttctgttgggtttaccaaggtggtggggcctgcattgaagctcagcttttcttctgccagtcctgcttcttcctcatccctttcatgttgttgagtccaacaagacagttcttaataaacatcctgcatgctaaacttcaattcacagtctgatttctagagaatacaactggcatcatatactttactattacaagtaaaatatcatatggataaatattttctatttgaaatgtccgtaaagttttacttttaaaatcagttttcacatgtatgcatagcttcagattacctgtactatcctttaaaaattcacaaagaaagctaaaaatgcttgcaaaaattgttagctcatgttttatatgcagaatcttagtgactaaggaattttaagaaaatatttataatgatagggtttcaggagaccctagagatcgcatcaaacccacttgtacagataacaaagctggagcctagagggctaagaggactctttcaaggccatgccagggcttagaacacaagaagtcctactactgctttagctttctgtgttcagggaccgagtttttttttttttttgcctttcttctctcttttctttcctcttctgtttctttaacctaatttgcttcctcatgttcgtaagccacagctgtttcccagaactgtgaaatcctttccgagaaatgattaggagtgtgatgtgtgtagggtggtatagagagagcacctataactcctgtaattctgtcaacttgtaactgtgcttaaaatttatcaaattagagggtgttttctgagcctcatgacactagcggttttcccagatgaagtgaatgttacccaggtttcctctgagaatccagaaggcaggctgatgggcagcttcttcattttacattcgagactacacatttgtaccttcctcccatgagcacaaaaaaagtattcaatatttcttaggcattagatgtaataaagtgtcattaggagttttatagtgtagaaaaatgtattatttccgagcccattttagtctttctatgtgggagacagtgtatttactgctaaacatgttctacagtatatggcctgaatatattctgcagttatctcatatctaagcaggtatttaagtagttgagatccatttatctttcctgaaatgccttaataatattttataactcattagcgtgtacaaaatacttttacgtatgtgtattaaatgtttgttgaataaattatacatgttcttatattcagacattagaaaagaaagttatgtaataatctcacttaatttaagcctcaatctatgaagtaaatattatcttctccattttccaataagaaatctaagaatctgcaagtttaagttctgataaccactggcttacattttctgtttatcatgtcccagacatgttctaggagctttatgtgtattaactatttctttgaacaacccagctgaagttggtaccattattatcaatggcattttacagttgagtacaatgaaacacagagagatagagtaacctggccaaggtcacacagtgggtgaatgttaggaatgggggctgggcgcagtggcttactcctgtaatcccagcactttgggaggctgaggcgggcaggatcacctgaggttaggagtttgagatcagcctgaccaacatggtgaaaccccatctccactaaaatacaaaaaattggccgggggtggtggcgggtgcctgtaatcccagctacttgggaggctgaggcaggagaattgcttgaacccaggaggcagaagtaacagtgagctgagatcgtgccactgcactccagcctgggtgacaagaaagaaactccatctcaattaaaaataataataataataaaaggaatgggatgcagcctaagtaggatgaccaactatcctggtttgctcaagactgaggagtttcccaggacacaggattttcagtgctcacaccataacagtctcaggtaagtggaacagttggttggcctaaatccaggttgtgtgctcaaggacctacacttttaagcacctagctcttctgtttctcatgcagaaggcggtggatccagggtttgaaccctcattgagtgactctgaagcttgtgcttttatatttccatcatgttgccgtgatttgtattttaatacaaatatatcacaaaaagtgatcatagattactaacgtgtaatatgtttggataggtaatcatataccaaagccttatacatttagttagacaggaacatgcattcggatatttgtcatgattcttttgtaaacagctttattggggggataattgatagcaaaaaagcacatattttaggtatacaatttggacatatccatacacccatgtaacagtcactataaccaagttaaaaaacatatttatcagctccaaaagttttctcatgcccccaccttttagtaagttctagatatctgttcaacatagtgcctatatcttgtgctctttaaaagttgttaggagagtagatctcatgctttcattcctaattggcttcgtctcatttgacaattggctgtttaatttttcttacacttcagtttctcccaaaagcctattccctattttccataagttactacagacttgtagtacagattgatattttattcttccctttcccatagttcactcctgaatgatatctttctcatgtgtaccctacttcaacttcactttccctgatgggtctgaaatatatgatgtatacattcagtatccacagatacctgccagtttcctcttctgtcatggttcctccttatctataggcccttccttctcaaagtgttattgtttccctaatcccaactcctcacatctcttcagtttcatgacatcttcctataatattgtgccgataaaactgccttcagattggagagaagggagaaatcagtgtaaactagtgttgtcatggacacctttatagaggtgatattagtcaaactgcgttttaaagagtgcaaatgcgatttagatgagcatcagtaatatcaaagtcttgattttactgatttagatttgaaggaagattacatctaggaactaaggaatattaaattagtctttcttttttatttcatgaacttaatcatgagtgaactactagctgacttatgcaatttctagactctgtctttgaaggcagtgttcttaaattgtggaggcacatggtgcttaattgtattggaggttggctttgcattgtaaagagcatgtttgcgtaacgcttatcaggtgagttacttttgactggcatttatttaacttccttgagcctcgattatcttttggctagccaaacttaccatgtagagttgttgtaagaataaaaatagataaaggattaataaaatagctagtttagtgcctggcacatagtagctattattagtcttacctaaaaagttgttattctgttcatggatgaaagcaattgattttctacttctttcaatactctgatgagataacaagtacatgagaatggatgactgtggttagtattgtaggtcaggaataagaaattatttttaaactcatcccactctttccttctatagcaactccttctttgtctggattgagatttaagtagatgcttttctccagtgcttcagtactgaatgtttaagaatgccaggtattttaatttaaaagcatactttttcatcaaaaatgatgcattaaaaatattaatgttaacagtagataacattttgagatataaatatagcacactctgaaaaaatttttcatttaagcatgttgatatgttagatgttagattgaggtagacagagggtttgtgattacttgttttgtctacaaaaaggtagctatcagaaatgttcaatattgttcacattcatatttcaacagaactaccacttttggtaaataccaatatgtgtaatattttctggctacacttccctagaacaaaatttatatttttcccataattgatttaacttcattatttgaatatatcttatagtcaggtatgtaggtgatgcttactttatttatgctactaactttttttaaatttacttattgaacagtgcttttcaggctaatggggcctctggaggcaataagaaatagctgggaaaaatagatgaaatgtttcattttaatttcaattgttatttgcatgcaatttattttctttcagaccttttctctattacagaagttatgggggttggagggagagaaaggcaacgagagagagatgtgtgtaaaattgcctttcctggctgtggtcagaagggcatatgactgtggaagaatggtcagagacatgcaatgctaattgctttgaaggtggaggaaggtggccaggagccaaagaatgaaggcagcatctagacatggagaaagcaaggaaattttatatctatctatctatctatcatctatctatctatctatctatctatctatctatctatctatctatcatctatctatctatctatctatctatatccttacttgggaagaaactttgtggatgtgattaaagatatggagcttgagatgggttatatgattgtgatcagtctaatcacatgaatctttaaaagtggaagaccttttatgcctttcctggctgtggttaaagagaggtgactacagaagaatcatcagagagatacaatattgatggctttgatgatggaggaatgtgatcatgagtcaagaaatgcaggtcatgtttggaagctggaaaaggtaaggaagtagattctcccttagggtctccagaaaggaacatatccctgctgataccttgacttttacccagtgaaacctgtgtcatatttctgacctccataaatgtaagagaatacatttgtgttgtttaagtcactaactttgcagtaatttatgacagcagcaataaaaactaatacatgtgtacatttcagattgtattgaaggaaataaatatattttcgttgttttgaatgtatgtatattcatctctagcataatctgtagtaatataagcttaaattatcatcccctacccaagacaaatttatttataggagtccccagtttggtgcaccatgaacttgcatagagggaactctttccttatttcaaaggatatttactgagcacttagtatacaccaagtgctaagtgctggatatactgtaaataataatagacatgtttcccactcttactacattattgcaacattagtcattactagttctgccattttttctcatttttagattgtgctaaaaaggaggaaatactaaaagagtattgtactaaaagagtccttggataagggcctctttctttcttggtttgcagttagcactgttccaacagtatgaagacataaacaatttttaaagaatggaagcctttttgaggctaatacatattatattcgttcattttcatgctgctgataaagacatacatgagactgggcaattacaaaagaaagaggtttattggacttacagttccacatggctgggaggcttcacaatcactgggggaaggtgaaaggcaaggaggagcaagtcacgtcttacatggatggcagcaggcaaagagagaccttgtgcagggaaactcccatttttaaaaccatcagatcttgtgaaacttattaactgtcaccagaacagcaagggagagacctgctcccatgattcagttatttcccaccgggtccctcctacaacatgtgggaattatgggagctataagatgaaatttgggtggggacacaaaaccaaaccatatcattctgcccctggcccttcccaaatctcatgtcttcacatttcaaaatcaatcatcccttcccaacggtcccccaaagtcaacccatttcagcattaactcagaagtccacagttcacaaagtctcatctgagacaaggcaagttcctttcgcctataagcctgtaaaatcaaaagcaagctagttacttcctagatacaatgggggtacagctattgggaaaatacacccattcataatgggagaaattggccaaaacagaggggctacaggccccatgtaagtctgaaatccagcaggggagtcaaatcttaaagctcccaaatgatctcctttgacttcatgtctcacatccaggtcatgctgatggaagaggtgggttcccatggtattgggcagctccactcctctggctttgcagagcacagccttcctcccagctgctttcatgggttagcattgagtgtctgtggcttttccaggtgcatggtgcaagctgtcagtggttctaccactctgttgtctagaggacggtgtccctcttctcacagctccaataggcagtgccccagtagggactctgtgtgggggctctgactacacatttcccttctacactggcctagcagaggttctccatgagggccctgctcctgcagcaaacttttgcctgggcatgcaggcatttccatacatcctctgaagtctaagcagaggttcccaaacctcagttattgatgtctgtgcacctgcagacccaacaccatgtggaagctaccaaggcttaggacttgcaccctctgaagccatggcctgagctgtaccttggccccttttagtcatggctggagaggctgggatgcgggaaccaagcctaggctgcacacagcacagggggcctgggcccgggccatgaaaccattttttccccctagacctccagtaaaggaaggggaggggctgccatgaagatctttgaaatgccctggagccatttcttccattgtcttggggattaacatttgactcctcattatttacacaaatttttgtagctggcttgaatttctcctcagaatatgggattttcttttctatcacattgtcaagctgcaaattttttgaactcttatgctctgcatcctttataaaactgaatgcctttaatggcacacaagtcacctcttgaatgtttcgctgcttagaaattttttccaccatataccctcaatcatccctctcaaatgcaaagatccacaaatctctagggcagaggcaaaatgccaccagtctctttgctaaaacataacaagcatcacctttgctccagttcccaacaggttcctcatttccatctgagaccacctcagcctggaccttactgttcatatcactttcctcaaagccattcaacaagtctctaggaagttccaagccttcccacattttcttgtcttcttctgagcccaccaaactgttccaacctctgcctgttacccagttccaaagtcgcttccacattttcaggtatcttttcagcagccccccactctactggcaccaatttgctgtattagtctgctttcatgctgctgataaagacatactggagactggtcaatttacaaaaggaagaagtttattggacttacagttccacatggctggggaggcctcacaatcatggaggtaggtgaaaggcacattaagtcacatctcacatgaatggcagttggcagagagcttgtgcagggaaactctcattttgaaaaccatcagatcttgtgagacgtattcactatcatgagaataacgcagaaaagacctgcccccatgattcaataacctcccactgtgtccctcccctaacatgtgggaattatggaggccacatgctgaaatttgggtgaggacacagagcaaaatcatatcacatatatattcaggtatcttaatattttctcatataacatgggatcaaaagagagcttattttctttggctatatcacattgtttttaagatacctcttacaatggaacccctgagaatttaaaacaatttctggccaaaatggcagtaaccaaggaaaaagctcagttagaattccaagtccatacacatttggaatccaaccctgacttcaaaaacagtttttaagtaagtcattctgtgaaaattaaattataaatgacccatatgtaaagattaattctttaactactatagcatagcatgccccctgaatgttaacagctcttatttgtttcagaagggacttcaggcaacaatttatatcttgtggttttcaatctggcttcatttgtcaccgagttgtgaagcttcaggattaaattttgtagggctagtgaacacagactccttatcaaatgttcttgactattactaactctttcggtattgtgcaaaaagtagaaagaaaaatacataggaccaaaatatcaaggagtttttacttgctgtaaaattcttcccatatttaaaatacatagtacaatacttgttgtttccttaaaggaacattcagaaaaatgtagcactctttatgtgctttccaatgtggtagtcattagccagacatgtgaatattgaatgcttagattatggttgtccaaactgtttacacgtgtaaaatacacactggattttgaagatttagtataagatgaaaacatttaaaatatatcataacacactttgtattgattacatgctgaaattgtaaaattttgatatatttggctaagtaagatatattgttgaagttagtattgcccatttctttttacttgttttaaaacatagctactaaaaaatttataattctaagtgtgctttgcttctgtgactcacatatttcagttggacagtgctgttttaggtgttaagttagttattccaattgtaggaaaatacagggaaccatgtttggattcttaaatatgaagtgtgaggtcagtgtctcctgccttgtgaagccactcctgcttggtccttctcttcttcctgagtctggtgtttcagtgggggtatctttcttgtaaagagagtgaaaaataggtgtaatacatataagaaaatgattagaatgtcactgaatgtcataaaaagaagtgaataaaattgagaaagaagagtgggcagcatatttattctgtcagctataactatgttctttgtcctttttcagggaatctctagaacacgttctttgaaaatgagaaagatagcctgtttattcaccagataaagattacatgtggtctttagcaagaaacatgaactcaggaggatgacagattttaaccttaatttgaatggaagggaagcattgtataagaaggattaaataatgtgacttcacactgtcttcatactagataataactgaaaactgattggcaatataacatttattattttccctgtaataccgttattagaacacaggaaagtggttatccaaatgcccatgctttctaaagaagaaaccaaaggtctgatgtctggatatgagttcagactatctttccactaagagtaaagacttctcggtttcatgaaggacaggctggtgaaaggcaaaaagacaacctataaaatggatacagagagagaagatcgaatcataaagtctctaagcctttgtccaattatgagatatttttcttttgtttcaagactttactgaagttctgtgagctacactcattgtgtaaaattgataaaggttaatattaccatctaatctgttgaatattattttatttaaactgatataccaaaggaaatcatgagctttgtgttagcaaaagggagagattttcagtattctcttactgcttacaaataactgttttatcacacaccaggcctgtcagtgggtggagagcaaggggagggagagcattaggacaaatacctaatgcatgaggaggttaaaacctagatgatgggttggtaggtgtagcaaaccatcatggcacatgtatacctatgtaacaaacctgcacattctgcacatgtatcctagaacttaaagtaaaataaaaaataataaaaagaagttcttaattttatctccagggagagagggacataattgtgaggttcataaagaagcaaatgaaaagtgatcatacttgatttcccaaatggatctttgcttgttttaggagcaaggataagaggttgcttatacacctagttttgcaaaaggttgaatactttagccatcttagcatttaaacattgctgatattctatatcccaagccagggaaaagagattctgactaagcaagaaaatccgaacactgaaataccttagttaaaatgaaaagcaggaactactctgggtttctttacaaaatgcaatttttcctctacaaataaactcattggtgctaatcttgtaaacagtggtaactatggcacctaaataaaaatggcactttatttcgttagcatcatggagggtttataggagattactttgaaagatactcagggagacaacttggggattctgtataactctcttaaaagaattcagaatgctctcagatgatagaggaaattaggctttttctgcatgacttcaagtgaattaggaagaagaaaaaatgttgaaggagaaggacattttgttcaagtttaccaaagagcttcccaacaaatagagattatagtgaaactggtggcatttggaagccctaaaagttcagctatgaaataaagtgtaaagcagaggattgaaaattgttgtaaggtatgctagagtggaatttcagcctttggtagaaattaggtaggatgctaggcaagctgaccttcaaagacccttcaatgctaaaattctatgaaaagcagtgattgatttgtgttagttttctaaaaagaaactttcagtatctgtattgcattaagtattgcaaatccaaatgaaatgcattattatttaaaattgttgaccattttaatacaattcattgtgctctctttcacatccttctttagtgcagtgaagaacatgcttattagtatggatcctcatgttccagaagagtcctttttctgagtggtaaatcaagcatgttggtgtctctgcagcaatcccaaatacaacatagcctggtagctggtggtactgctggtactgcttgtctctagcttgaccttattaaaacattgatcagcaatggcctcatgtagcttatttgcacacagcggccccatagtagatatcatttgtttcatgccctagtagttttgcccaatgagtagtttaaaagacactaaacttaaaatcctcacagcactgcaaagatgggagtttgtctctagtttctcactcagttggaatgacaaaaggttagagcaaaaagaggaggtgaatattgtttacttcagtggttctaaaccctggctatcctttagaattgaagagtaaaaaataattaccagagtctgagccccctacttagggattctgatataatttatctacagtgggtgctgggctctggtattttttgacagctccccaggtaattctaatgtgaagccaaggttgggaaacactagtcttttctaatgtttttcttattatactttgttttgttttttaaattgacacataataattatacatgtttatggagtatatagtgatgttttagtacatacataaagatcagattggtgtcattagcagaaccatcatctcaaacatttatcatttctttatgttgggaatattcaatatcccaacagttagggaactgttgtatcttctctcaagtcttttaaaaacttaggttataatcagaatagagcaatttttttaattaacattgggtaaaatagtttctttttttccttttgatatgttcgtttcttaaatttaaaagtaggaaatgtctaaatgtgttcaaataaatgaatgatcaaggccaaaatcagaagcaggttttatattttatggaaggtacttttgcataaaagaatccataaagaacatccagtatgttttctctgagtcctctgaaatgaacaggtgctctcctatttagttagacctctcactactgaacattataataatgtttgggaaagatcagaattaacaatgagtcagtgagttacccaaaattgagtcagtgcttttcttcggagagtaataagataagttgtgaacaaaaactgaggtatgattaaacggaagtagattttcatacacctcaatattacttatattttaggtttcgctcaagtttttcttagcctttatcagcaaaaatagaatttgcttccaacggtgctaatgaagtgttgtcaatgaaggaattacaggggtatagtcaaggtaagggacaaagccagggttgatgcaatgccaagaagctaatgacagtgggaagcctaggtctgaaaaagtaaaggtgcagaaagtaaaacagagttactggggcaggagctgatgcagaagagaagggccactcaatggagctgtgggattggaagtcactagctgttctgcactactaaaaaaataaagaaatgaggaaaaacaagaaaaggaaaaaaaggaggcagtccagagatagagagggatacagaataagtagctatggtctgtctctcttttgccctccaatttcttgctggtatttactgttagccaaatgaaagccaagtggagcttcctccttagcccatttaccagtagagttctcattgactcttttcctcagggctgttttcctggactctgaagtctaatgtttcctgatacctctatggaaacttagggttgcagtgtgttttactgaattcttggacactgcactttgctttcccatctttattagaatgctatatcttatgttttaacttgagtgccaactcttaactattagtagcatttactaaaaaatattctgaatgagctttatgtctttgatatttcttgccaaatcagaggttaaaaagaaaaaaaagtttcagaaactttatagtcttttcccctaaactatattattgcttttctcattttataactctgcaacatgaatttggctataaaataaaaatttcgttacttttaaataataaatacaaaattaatgttttcttattcttgctatgtaaacatttctatgtacttctttagatttctgcgtcaaactttttctttcaagattttaaatcaaaggccagaatttgcttagaggtagatttataaataatgtattaaattaattttttaaacatcaaagaaatcacttatggtattattaatgaaattggaattaaagattgaaatcaactagttcttagttaacatcaatctttattaattcatctattcattcattcatggagctaaatatttattgagtggttattaccgtatgtcattgaatgtaagttgccatcaattttaagtagcatcctgatttcagaaacattaacatgtaaaaaaatgcatactttagaattaatgaataatatgtgtggtgggtgtatttcaatttagaataacttatggttgggaaatagcttatgatctagaattgataaccaaaggcaagcaaaacaaaacaaaaccggattactggagtttcagttgtcatttttatacgttgcttttcttttttcaataagtctgtttatgtcttgaatgcgggaactgtattgtacttctttgactttctctgtggtgtgattacaaaatgtaatcatagaatgttagttatggaagagactttggtgatcatttagtcatctagtccaacttcctcatttatagaagaaggaatcagagaagggctagcttgcctgatcacctagctagttagtagcagagtgaatgaacactgaaattcagttctcaaattcttgttccagtgttttatctattattatacaatgtaggttttaagagtagatatcaatgaatatacatatgcatgttgtacgcttaccgagttcataattaactccaatattagtcctccgcttaggtgctagggttttacttttatttaaccgtagtacaaaaaggcttagtggtatcttttgtcatctttagatatatacatgtgttagtagtaggttttactttagcaaaacttcatccatttcctgttatattaaatggctcattcagtcttcttttgggtgcttttgttcttccttctagtaacaaaaattataacttagaaaaatatataaataatttatatgtatttgtatatttaaaaatagaatatgtatcatttgatctttcagtattcaatccttatcaagcacttaatttttaatttctgtgatgagtgttttcatataatttatgtaattttgttgcacttagtaatgagatagtccctacccgcagcctcctccatcccctacattacctaaattaattagtatacattttttagtcatgtagatacagaaaaagcttgccctgaagctttgcagatttggtgagtagtatttattatgcaaatttcctaagtgttcaaagataagttattttccagcatttccagtaggaaatgattggtagtatttctgttgagtacacaaagctgatttcgcctttgaatttaactatcacactttagcaccggctctattgaaatgttaatgcacatgtgacgtgccaacatttagaaaaatgtaaataaaattggaaagttccaggtgaatttatatgttccctaaaagctgcagaatataattactttttgactttcttcattctggcttaaaagttatagtttcatgttcatttctgcttttcaacgccttgtatcttatgtctcattcacccttccccactaatctcctgaaggcatagcacatgaagcctattatttaagaatgttggctttttagtttcaaaggtttaaatatgaatcttggctcagacttctaactagcgatgtgattttaggtatgttacttgatcttcttagacttagttctcatatatgtagaatattaaaaagattaaaacctcacaagattattctgaacattcagcaggaaaagtaatataatcttttttggttcagagcagttttagatacatttaagctgatatttttattttataatattcacacaacaaaaagtagattgctgaagctaagaaacctataagacacagcaaccacattttcttaatccagtctatcatttatggacatttgggttggttccaagtctttgctattgtgaatagtgctgcagtaaacatacgtgtgcatgtgtctttatagtagcatgatttataatcctttgggtatatacccagtaatgggatggctgggtcaaatggtatttctagttctagatccctgaggaatcgccacactgacttccacaatggttgaactagtttacagtcccaccaacagtgtaaaagtgttcctatttctccacatcctctccagcacctgttgtttcctgacattttaatgatcgctattctaactggtgtgagatggtatctcattgtggttttgatttgcattctctgatggccagtgatcatgagcattttttcatgtgtcttttggctgcataagtgtcttattttgagaagtgtctgttcatctccttcgcccacttgttgatggggttgtttgattttttcttgtaaatttgtttgagttcattgtagattctggatattagccgtttgtcagatgagtagattgcaaaaattttctcccattctgtaggttgcctgttcactctgatggtagtttcttttcctgtgcagaagttctttagtttaattagattccatttgtcaattttggcttttattgccattgcttttggtgttttagacatgaagtccttgcccatgcctatgtcctatgtcctgaatggtactgcctaggttttcttctagggtttttatggttttaggtctaacatttaagtctttaatccatcttgaattaatttttcactcataggtgggaattgaacaatgagaacacatggacacaggaaggagaacatcacacaccagggactgttgtggggtggggggagggggagagatagcattaggaggtatacctaatgctaaatgacgagttaatgggtgcagcacaccaacatggcacatgtatacatatgtaacaaacctgcacgttgtgcacatgtaccctaaaacttaaagtataataataataaaattaaaaaaaaaagacacagcaactaaacgtcagtgccttgggggagctatatgtataattgttctcgcttccgtgaaaagccaggaagacaacacaacttggagaactatccctgaaggaatagcacagagcagaaatacaactcaaaaccagcgaagctatccccagggatacagagaaagagtctgcaagcattttgcaaagcaggcgttgaaagagaaaaaacttccttggagagttgtgtagcagatattagaattaaccaatagatagaaatatagaaacagaattgatgaagaattgataagattttgagagaaatgacatcacatttttaaaaatcaaaatgcagtgaacccctacccatttaaaaatttatattttaacattcctgaatttggaattgattaatgtcctgtcttcccccatcaagttgattttctatcttataatcaagtcataatcctggattggggcaataaaataatatatgctttgctatattaactaatacactttgaacaattgcagatgaaaatataaaaaaaattcttctcatttaaatataatcgctcatacaaacacacttttatataaggccattacaatataggcagaaatgggatatagaatataatgagacactgaagaagagtaatctgggatcatggaaaaggaagatccaaatgagatcatttttcattgctttgatcaattccttaattgtacaactacaaatctgttatttatggtttgtaacagataggtacatgttcagttcactctttggttacctgtaggtaagtgtcacctcacagtgtggctaaatcacttcgaattgaattttttgttgtcttcataaagtcctgaattagaagaattccattcttctatgagacatagatactaaataaagctttaaattgcaagtaagaattatttgacaaagagaacaggctgtggccattctaagaatggtttccagataagcctgtttctgttcggtaactgtgttaacaccctgctgtgttcttacatggtcctctattgtgtattttaacctgggcattgaagtgcatcagcaaagtctgaccaataactccaattgacttttccaatcatgttcccattattgagtctttgacatccaaggaaagcatgtctttctctgagcatcctctgtttctttttgtctcttattttatgccactcataaagcttcgtttattgtgaaataccctccttgacttatctctgtaggatgaaatcctaaccaaacttcaaagcaaatctcaaattgtcactctccaataagatgaattgattatcataacattaatttcttttctcagctcttccatagcatatgattatacttctgcctttagcattttctacagttagttttgcattatactattttctagatttatggctctgattatctacagttctgtctttcccagtagaggtcacacatttattgagcacatactatatttggaattagcagtgttgaaatgagatggccgtattccttgctttctcagatctcaagtctactgaggacataaaaaggataatctctaaaatggaatattggtaccattatagataataatagggtgtcatggggctaggaaataatgtgggcctgggtcagaaaaaacttcctggaggaaatgaaaactctgtaaattggcccttcattgtatctctcacttaaaccattttgggtggaattatgtttcctgtgaatccttaacttatatttatgattacaaaaaataagatttactcctttttgattctttgtgtaaagctctgttataatattccttccattcttccttatatttacatgtatgtgcaagtgtgtgcatgtgcatgtgtgtactatgtatttttgtgtttgctcatcgagggggactttgaaatcttgatcagggtatacacagtgtttctttacacttgttactctgaaattatctgtttcacgttcatacacttttacaaggctctgaattctttttgggcaagtgccaccaccttctcataatcatagccacaggtggtcagctcatatagggcaggcaccctgtaaatgtgttgagctagattgattaatgtgtctatatgcatttttttttcctcaggagaaaaaggtctgttgaaatctttagttggaatatgtgaatattcttgttactatatatagtctgtaactatatggaggaaaagctttgagggtggaagagacatttgcaagctggagaaaaaagaatgtgtcagtatatgagggaatggtagagggaaaagtagatggagtgggaagctgggggcggtgaaaggtggtaaagtgagacactaagtgacaataaaccatttaaaaataatttgtcccaaagttctggctattctgaattcatctttgctgagaaattttacatttttggctcaccttttgggaaggtggagatttaggctagggaaaaagtagacaagtacaagtttccatggaaacaattaccataaaatatcgaccaacaaagatattaggaagcaggaaaggaaagagaaaaaagcaggaaagagatagttgccatggaaacatggacaatcagagacatgcacttgaagtgattccttcttatttattttagttaaatacctgattaaaattgttatactttagtttgtggtttatttttaaatattcataaagatttgtttaagaacatgtttttctatcttggtaagttataaattcacaggaattcagggaatatccttttattttgattggatatgacatcattttattgattacaaaatccatttaaaatatggcatttaatatataagctatgaaagcattattttataaaaatgactgtttaaaatttactctttcttcagagtaaattatgttaataatttttcttaatgaatgttaacatttttcttaatgaagtttaaattattgcttttaatttgcattgactagcagcataaaatactctaataatattaagagagggtcattccaagcattttgatacaataaaagcaggctcactttttctccaaacaattttgtatgacttaaattttgagatcctttttaggtttacaattttattttggttattttggctgtccacttactatataaacatgaaggagttactattaaagacaatatatctgtagtggataattatataaagattagatgattcaaaactgtcccatctatagataaatgcaactcagagaaatttggattgataaagcagaatattaaactccaatgttggctataaatttgtaggattcaattttaaagttccctttgaagagtactttgggaatatattctgaaatgatttcttattttttcattgctgtaaaactgaaatgtaaggagcttacatcatttcccaccagatactgataggaacttaagtattcccttaagtgtcaacttaaattgaattaccttttttgagaattactttcccctcctggctgtcacctcttgtcatcttctttggcatccagagttcagcattctaaaagaggagcatgtagacctcctgtggacagcttccctgttatgacagattttttgtatcttaaaaagtagcttctttagatgctgtaagactacgtgttatcgataacctttgcaaaataaagcatgttgatttttcagactctgtgggcaactgaaaagcccttttgttttcttaaggtcatagaactttataggtaggaggaacttagaggttaatttgtacaactctttaattttaaagcggaaaaatttgaggtacaaagagcctaggtgacatgctgaaggccatgtcgcctgtttgtcagtttagtgttctcttcacagcaccagtacatctccaagacatggcttggctatgttttagcctacaccttcatctctcttaatctacccctaagccaccacacgtacatgtacacacataaaccgctcactatgcacaggaagctttaagccaaatcattcactgcatgcttctcctataaagaaaattctgaaggtccatgaataccatgtaggctgcttaagaaataatgagcaagcattgaagtaaaagagtggtgtccttatttctaagtagaattaaccttcccctccaaaagatacacatccacatcattatcaagtgtaaaagacagctgatttccaaaatcatttgatttggactttccttctcttttcttagtgctaacatttttcacccatgttgctaacattttttcaaatgtgtggatatttccttataatttctctaagagaaattctactactaaaatgcttttaccaattttagtttgtagacttaacatttctgggggaaaggagtgcaagcagctaggtggccctccagactactaacaagctggagagtggagttttccctgttaaagagtgactatggctgttttgagaatcttggtgcctatacaatgcagcctttcaaaatggttcccacatggccaactcactaggattctctgtctttccattctagtttagttattaaattacacagaattattcaggtatttagtcctaaatacctgctctgttctaggtaacctgctaggttctaggaacatcaaggcaaatcatatatggtccttgtcctggaattttttcagtctagtggggatcaaagtggaacaaatagaaaataaagtataatacattgccataatagaaatgggatctcagagcaaacacccctaatgcacatctgtggaaactgtaggattgatgaaggtggaggtgaagtaaacaaacaaaatttaaacagcaaataaaaaaaatcccacttctctaacacaagttgtattcagcctttagcccttttttttttttgtacattcagccagttccttatagaaacatatttgcccttgtacagtgatttgacaatgccctcgctggggtttgatggccaggcctgccggatcttgtgattctctgggacagggattgtgtcctgctgtgtctgctgtgaattggtgcgcccaacagattgaacccttccatggcacatctacgcacctttctttacaatgtcacctagtacttaagagcaatctgtgggattaggcagatctgtgtttgatttgaggctttaccacaaactgtctacattatcttgggcaatgagactttatttcttcaaacctatttcatgttattatggtaagaattcaatgagacagtgttggcaaaagttttagaagagtacctagacaggaaagtctcaataatatgtcaagtgctttatgatgacacgtatgactatagaagggatggggaaactaggtactagcagtcttaggagcccagctctgtacacccagctcatatcaccctcctccactctctcttgtcccacctccctttcctttcttggcatgtggtgatgcaactgtgtctcccccttgtgctttttgaaaaaaaaatatttgcagccagctccaagttttagttggcaacaaatccgatagtaaaccagataacatgcttctctccaaagtaaatataaactgtatcaatagaaatgtagtttttggaactctggaaattcttctctggcacccctgtggaccatatttgaacacttagcctagtttcagatgctgcctctaaggacattaacaaacaagaatgaatcctaggaagggtgtgtgtattacttaatggtatgaaaaccatatcatagaagaaaaaagttcaaagacatagagataatagtgtggaaaggagtagacccagggtatatgagagctaaatttaatacagatagggctttaatgtcgagtgcagtgttccttgggaacttcaaggctggaatccctcagccattgcttatatgttttgagcactgtaattcgataggtggatagcacctgatcttcaggcaggcaatcttacccatttcaggctcactagctgtgtcagagaaggttgtggaaatgtgattgctcatggatatgtccttggaagagggactggaagacctttggtttaatgaattcatctgcacatttataatggtgagcatatccaaatgttttcttggtcagaaaaatttaagtattaataataccttccttttgtgaggaattgtcaggtcatgcttcattttgctcaataattattttatctcctttctaatagtgctgattaagcactatttcatttatttaagaaaagcttactgaacggagatacttggacaaaagagaacaaagcccatgctcgttgaaaacctaagtcctatgagcaatgcctttatttaaattgtactaatattacacataacaatatttaccattttaaccactttgaaatttacagctcatggcttttagtacataaacactattttgcaaccatcacaaccatctagtttcagaatattttgatcatgaccaaaagaaattctgtacccattgaaccagttgctcctcatttccccctcccccagtccttggctgcactaatctgctttctatttctctctatatgaatttgcttaagttgttgttcatatgaatgaaatcatataatatgtggcctttgtgtttgtcttcttccactcagcataatgttttcaaggttcatctatggtgtagtatatgtcagtacttcattcctttttatggctgaataatatttaatgttatggattcaccatcttttgtgtatctgtttgtctgttgatggacattcgagttgttttcagcttttggctatcgtgaatagttgtgatgtagagcaggtgagcccccaaattgggtcttagcgcaggagggtttttggctctgcccaggaaagaattcaagggtgagttggtgatgttagacagcaatttttactgaagtggcagtgcacagcagcagcagaagtgttgtttcttgtagaggagggctactccacaggcactgtgcccagagtagccctgctcttcaaggagtggtacctctgctactgctatacactgccacttcaataaaaattgctgtctaacaccaccagctcacctttgaattatttcctgggcaaagccaaaaattatcccatgctaagccccaattttggggttcacctgccctacatcagctgggctatgaacatttttgtacaaatttttgtttgaacagctgtttaaaatgcattgggtgtatgccagagagtatcattattgctgggtcatatggtaattctttgttaaacttattaaggaagtatctatttttctaagtgagatttccaggttttatagttactggtttacatgcagtttgtggaattagaaaaggttctcagggcctttattccctctttttgagagatttagcaatattctgtttgacatgagaatttctaaaaatccatttataatactgaccaaaattataatcctgtgaataaatttttaggaaagatcttatctaggaggggctttctatatgccctacatatcattcccatttcacaaggagttgtgcaattggagccctggccttgctgcctcaagttggtctctggcaccatgcaacgggaagaagacctctgggctttgtgagctgaactttggctcatgctcatgttcaccaagcagaaatgttctttccaatttttaggtttttcaggagaaactgaatatctaaatttttatatgatgatcttctatgtttttaatgccggcaactcattcacatttaaacaaaacaaaacaaaacaaaacaaaacaaaacaaaaaaaacaaaacaccatgggccaagcaaaacaagtctgggagctgaatttgatgtgcaggccattgatttactactgctttctttttctttctttcttttttttttcttctaacttttgttataggttcagatggtacatgtgcaagtttgttatctgggtatactgcgtgacactgaggtttggagtatgaatgaatccatctcccaagtaggaaacatagtacccaataggtagtttttcagcccttgcccacctgctcttcttatatttcccagtgtctgttgttctcacctttaagtccatgtgtacttgatgtttagctcccacttgtaagtgagaacatgtagtatttgggtttccatttctgcattagtttgcttagaaaaatggcctccagctgcatctacgttgctgcaaagcacatgatttcattctttttgatggctgcataattttccatcgttatatgtagcacattttctttatataatccagagttgatgggcacctgggttgattcagtgtctttgtgaataatgcagtgatgaacatatgagtgcacctgcctttttggtagaacagtttattttcctttgggtatatactcagttaaggaatttctggatttaatggtagttcaacttttagttatttgggaaatctccaaacggatctacacagtggctgggtacatccccaccatctgtgtatgagttcccctttctctgcagccgtgccagcatctgttgcttttagactttttaacaaagaccattctgagcagtgtgaaatggtatctcattgtggttttgatttgcacatctctgatgattagtgatgatgagcatttcttcatatgtttgttggatacttgtatttcttccttgagaagtgtcctttcatgttctttgcctactttttaatggggttacttgtttttcgcatgttaatttgtttaaattttttttatagattctggatgtttggcccttgtcagttgcatagtttgcagatactttcccttattctgtaagttgtctgttgactcccttgttagtttctcttggtggcagaaactctttagtttaattaggtcttacttgttaatttttgtttttgctggatttgattttgaggacttagcgtaaattctttgccaaggccaacatcgagaagggtatttcctaggttttcttttaggatctttgtagtttgagatctaacatttaagtctttaatccatcttgagttaatatttatatatgatgattggtggtgttcagtttcattcttctaggtctgattgctttttctttatgagcataccaccactcagatgattacaatacaataaaatcaataatagctaatgcatttatgctaaatactgtgttctggcactagtgtaaacatttaacacgtgtcaacttaatttaattctcatgacaattcagtgaggtaggtgtaattttattgccattattgcaatagcacacttttcagagtactttggttatttatttatgaacttgatttcctttatatgttgaaagttccttgtgggcatgaaccacgttttacttacatttatgacctcagaactgagtccagtgcctaggatatgtagatattctctaaattttggttaagtgaatgaatgaatggcatactgccctgactataattctggtctgccctgcaatagtaagaatactcactaatatttaaggctttctgtgtgtttgggacagtgccaggtacttctgagagatattaatttattattaaaggccacattgtgaagaacttgggttctcagtctctagaaataaatagacttcccgattcaaatcttgcctttaccaatttttgtttgtgtgatcttggtcaaataacataactctatgtactttattttttatatcttcagatggtgacaatgatgtaataataatcatacccaacctcttcaaatgattatcacattctctgtactgttctaagcaatttgtaaaaattatttctcacaatggtagccagttcgtggattttgtgagaattaaataagttaattcatgtaaagcatttatattttgcttggcacatagtaagcactgagaacagttggttctttgtattatatccattttacgaaagagaaaattgagtagtagagatactgagtccatttttttaaggttgcatggctagtaaactacagaattgaaattgagactgctttctaccttgcttaaagcctctttctttctttcttttttttttttcaagatggagtcttgctctgctacccaggctggagtgcagtggcataatctcagctcactgcaacctccacctccatggttcaagcaatttccctgcctcagccttctgagtagctgggactacaggcacatgtcaccacgcctggctaattattattattattttttgtatttttagtagatacggggtttcaccatgttggccagactggtctcgaactcctgacctcaggcaatctgcccacctcggtctcccaaagtgctgagattacaggtgtgacccaccaagcccggcctaaagcctctttctttaatcaccatgttgtgcagcccatctccttatatacactttccccttttctccacctatgtagcatgtgcttaatctctagaatcgagacaaaactggttatttctcccttctccaacccattctagtgtttactgggcaattcgtcttttaaaaatcatgacagcttcctcattatcactatcataaattgtactttaaatctgttcatagatcttagatcttgtcttttcatttttttctgcatcacagcctagcacaaaacctcatatgaaaagcgcataatacgtgagaggttctagcaggtgggaagaaccactttatcaccttcatcaaagaacactcctgttctcttcaagtgtgggccacttagagttttggatggatgagcataaaggagagaaagagacccaatctaacccccacaatccactcatcaattcccttatttattcaggaaatacatgtagatataatgaataaaccctgatgataaaaaatgggatggattttgccaccagacagcctgcacatctttctcttatagtgtatattgattctcttaaaacagaattaaaaatgaaaatgtatgctctgaacacactctctcactgtctcggtttctgtctctccctgcttcttttctctctctctctctctctctctctctctctgtctctgtctctgtctcttggtctctctcaatttcatttaatgcttttttattttcagtggaccctggggagtggacaagtatttctagttaaaatataactatttatagttaaactcctgctgattgggtcacagttacactggtgccctatttggtgacttgagggagcttgaggatttggaccctttatctctgtcattttgtatatctggcagcctacaggttacatgtgaaatatgccacatgaacctgccagtgctttaagttcccagcagatattctgcagagtagtagcacatcgtttttgtagtacatctgtaatgccatgtaatgccactcaccaaattccagcaaattaaagaaacttcagagaattcaccacaaactgattagagaatagaaagagttatttagagaaaagattaaaggagctaattagcacagcttgatggagtggggactaaagggagagctaatggctctttgatattatttgaagatactaaatgtcaaggaggaaaaaatattttgtataatgcaacaaagtgctattaagagcaatgagacagaactgagaatgaaagtattaaaatgaagtatgtgagaactctattaaaatacaatttgttaaattgtgaagtagtctttccaattatgaggtagaagatcttcctcaaagaaataaaaatacacatataaatatatactaacaagctttaatgaaaataattttaatacttgttggacagtttaaatggcctgctgttttaaacgtttattaatttcaaatttgagcaattatttcatcccaacaaaagcctgttctgtcctcagatatttctacatatcctgaaaaaccctaggtctctaactctgtaagagaggctgagaataccaatattttaaaaattattctttaggatttcgtttcattggcacatctctgagaataatgggagctattgaccagattgacatttctgtggttttgtgccatggcattttccattcccaagtgagaaagttattccagttcatacagaaaaaattgtgtcaaagtgttaccaaccaaattccacaaatcaccatgacactaccaatagaacatgcctgtaatgtaagttgttgaaaactgagcaaataagatgcgttgacaaaaccagtcagtctaagaatattgttatctttttaccaagtgaaaagatactgctttataacttgaattgtagtattggggaaaaaagggaaaagaagagacttcattacatgagtaaaattcaaaacataattattgaaaacattagcaaaggttttactgtttggatgttattgcagaaatagcctgagtttataataaaaatgataggaagtctatagaaaacaaagtgggaaaagcatgtcttcgccagtgtgtccccaggtgctgaggagccccatcttagaggcaacatcaaggtgtcaccatgtgttacaggtacactctggccttcttatcgcttattagagtgttggagatttttattttgaaatattaaatgtatttttcttttcttctttgttaacttttattttagaattgtgggtccatgtgcaggattgtcacagaggtatattgtataacgctgaggtttggggtatgactgaaccatcatcctggttttgagcacagtacccaataggtagtttttcagcccttgctcctatccctctctccacaactagtaggctccagtgtctgctgttcccatctctatgtccatgtgtatccaatatttagctcccacttgtaagtgagaacatgttgtataaatgagaaagagatctcccatcttccatttggtccttagtccagaacttctaaaacattcttccattttttgtggtctgacttactcacggctactgcatcttttacaaagctttctccatggtcttttgctccatgtgaggaaattcaattttagtctctatttcttccttttcccccataaaaattgctgtttagtcataagagataaggcatctaacattggcatcaattgagattaattcacctactgcatatgtctcttctgttatcaacgttctccatttcattcaaaaacttcagtgctaggtcctcttcacttgaatgttaagtcccaccagcctttgtctgagaatcttacatagatgatattccatgtcccaaacattctgaggtctacactttccacatagaatttcaacaaaattcaccttataaaagaaatttagtgaaagtaagtctctttgaagtaatgtttaaaaaatctcattgaaatatatattctaataacatctatctatactaatttctcaagtagaataaagtgtatataataaataaagaaaattctatgtatggaattagcaattcaattctatattgttgatgattctaaaggaaatttcatgttttatcaggaaccctggtagcaatatgaactagtagaaagtgtccagcctatagtagtagtactggagagatttggtcagtgttgtaacagtttgctctgcacgacaggtggatatataaaagcccatcttttctttactataaaacattctacacgggagtgaaaagtaaaactctctctctctctctctctctctctgtgtgtgtgtgtgtgtgtgtgtgtgtgtgtgtagctatgaatactctggatttgcaaaaacaccactttgcccattaaaatagcatgtactcatttcacaagtcatctagtctaacatgtcatcagattcctggaaaggaagcttttagtgaaatactctttagatggactaatatattttatacagtcttataatacaaaaggagagttggaagggcatatgcagaaagaagtaagaaaataaaatcagaggagcattaaaacaaaggaatatgatagcattcactcccattccccaaatcccagcattgattaacctggtcctcattgcatacttcatcaggtgctactttgcagtcttcttttactattgacttttatgcttattttgcttttcacatctactgtcctctactggctgagaacaaggagcctcctttgttctctctgggctccttgcttatccacagtaggagagcattttaaacctaagtgaatacctacctgtggaatcgatatgaagattaaattcttatgaagtacaaggtataaaaaagttatctggtttccattacttctgtttctcttttgacaggactttctctttttccaaggcccattcccatttccttgagtaagtgtataggctctggcatcagaagacatgggtttgaatcttggctctgtcattttctagttaagtatccttgggtaaattggctcaatgtgttgtgcctcattttgtcagttttaaatggagatagtactagtatctactgtataggaattttgataggattgaaataatatatatatatatatatatatatacagtgcttataaagcgctcagtagaaaggctcaataaataaatatttgtggtagtcattaataatatatatttatccatttgatttgttttccaagaacaaaatttaattcattattcactgatgaaatttgcttaaaaatattatgagtatcatgtaggtttgaaatactatgctaggcatctgtgaacaagacagaaattgtggtttttctgtatgagttcagaatctagtgggagataaagacaagcaggaggcaatgggtaggacaattactatgattaggcttgacctttgactcattcatccctcctccatagccaatcacaaaatcctctccaaagaaagaaatattttcttcaaagtatttcaaagtctctcctttgcagtcttctgccgcctccctcatcctgcagtttgttgttgctttgtgcctattaccacaacagccttctagttagtgtccatgcctatagtattttctccttcattctctgcctgcgtggccacattaatcttctttaaacaatgctttcatcatgtcactgccctgttcagtaactttaaatagctcgcttgtgcctcctctgtcaagtctgaagctatctgctaacttataagaccacccaccatcagtccccagcctaactatataatcattttttccacttctcctcacagtatagcaggcattctagtgagcatgaaaactgcatgccagggacactcaatcctacctccagacttatcactattgtcatagaaatgactaacctttgagtgcttaaggggtgctaggtattgtactcgctgttttccacagtttatctttaatttttataaaaccaagattcttcatagaccttattatactgatttacaaatgaggaaaagtattctgagagggtcaggaatccaggatccaaatccatgtctgtttcatctcaaattcctccttcttttcactgtacctcctccattccatgccgctcatttgacccagaatgtttttctcctcattctatcaatacaaaaaccttaaattatctccataacctaagtgctggtttaagttctatctgttttggaaaatcactaactctttggaaaatctgtaactctcccttcactaatttccttcattgttaaactcctgaaatgctaaccatcaatatcaccttgttcctaacctttacacttgtatcatatggtattattctgtatgtgccagtcttctttcttcagctacattgtaggtatattaagcatgaacactccatgttatgtcataatctctcagatgagtggcagtttttctcagcctgaagtgtatacataatacacgcttgttgataggattatttgtcatcctcagccattgagttatcttattttcttgggtccatgcggtcagtacagaaagggtaagccttaattcaatttaaaaaattatacctcttacaagagagatagaaaatataacaagagagtacatgttggggtgaaagaaaatagaaaaataaaagtggggacaaagttgctgggaatgtgactgaaaacatacaatataatgctggaggtaggtcctgtttcctatcagtcaaaggtgaaaaaacaggagccttctctcttacaaaatgtattgttcagaagataaaacgcaaatcaatcgctcataagcagtaaatctatatttggtatcaagaccagacagaaatttctccccatgcgttctcattaagaggaaattgagtaaagtcgtgaacacccttgcaaacattattacagtattaacaataaagagcttcttaggaatctttcttataatgaccctcagtctggccaatgacatcatagcaacaaagtgaaatacattaagaacaattcctcaggtggggaccagagcaaactctggtttagaccccaagaaactcatccagtagaagggctgagggatcaaccctcaaagtaggtgctgttccaaatcaatgctctaggggtctggaagctcaggtgtggaagtgaggatcagatatggtaggtctggcctgcttttagtcttttttcaggtatgtgatagtatcttcattctacttggtgatctgtctaggttttagtagaaatttagactgtggctagcactacagtggaagggattctctctgctgggaacaaggcagagtcccaagcattgggctgaagttacaggcatagttcttgttttggttggaaacagaggtactgatcaagaaaccaaagtgaacagccagtcacatgcatagagttagggcagggatggtgggggatgtgggattagcttgatggacttagggatgtgctggttcactcagttaggatgcaccaagtatcacgattagtaaggatggggctggaaatatacctatgccaggctctgttctcattggctcagcagtggtccccagtgtgtagaacggaatcgcctggggatgcttgtcagcatgcacatccctgtgccctacccaggacctcctgagtcaatgtctttgcaggcagctgcgggtttaacaacctccccaagtgcttctgatgtagactaaaatttgagaaccattgaattagggagtaagtggatgaacctacaggtttgagatataagtatctgttcttaggctgacttgaagctaacattggacacagagcaattttagtgggacttagaggaatagacaccatcaaatttttcataaagcattgaatgatgaaatggcttggaagaagtcattgagttaaaaatggaatttttatgacagaagtgcaaacaggaaaatttaaatgtcctcttaataatgagagaaggtgcacatttaatgaatggggaagttttaatatgagctagcagcacaccctgcgtttaccttcatggaaagcagctctcagagcacctgagaagttttattttgggagaagggagatctagagggcccacatgcagctagggaaataataacttgacagcagatgaaaacaaaatgataggttgctgtaggaaacagagtggctgggtactctgactagaatgtttccctggttctgaatacattataactgcaccagcacgaagatccagggcatgcagtacatatttcccttggtcttgacaggttatggggaatcatgacaagctttgccttgtcaaaaaatagatgttttgactgcaagtttgcgcacctgtctttgatgatgaggagctcatcccacgctgctgcttgttgtgttattgtttcatttgtttgttgtgatttaaaatggagaaagaaaagaattggggaaaacgtttgaaccaaagcaatcagataacttcaataataaaatgctacccaggcttttgtgataggaaacctatgcaatcccactgctaattctgttctcgctatagggattcatggagcctattttatcagctcagtggggttcaatgtctctccactccgatgggaaaaaagtggaattatcaccagggtaatgaaaaacaccccatcccatgtttatagcatgttttattaaaagcatgttgctttggcctcatataccaattgcaatatgtgagtgtaagatgccagaatagctctcaagggaagcactttccttcgtgctaatttaaaattcctcgaagagcacgcagtcaggtgtggtgttaatattttgtatcttttctacctgagattttcataaaggagatgataggtggagtagagtaaagggtcagctgagttttggagccacctggccagggctgggaatttactatgatttgctttcacaactattctttacatttctgatagcccacactctcttattttatgtcataatcattagggaatttgaatgagtgttcctattatgattaagtaaataacattttacttataatttctgttaataaccacattttactttgtataaattaattttctattatgccagtggaattttcacatttgactctttgtttctgcgaaccttaacccaatgttgatttttgcaaactccaccattagttccttccaattagcatttcattctccagctcatctttatcctaattctttcaaaactttagggcccatattaagttctaggacaattaattcctaccacagtgtgtagttgagtagaggaggtagacttgtaaagaaataacaccaatatagtgtgacaaagataataatagaggtgtttaaagagagaagtttaattgagaagagtgatatttcagttaggtcttaaaggactgagtggaaattcaccagactttgaagagaaaggtgcttatgcctgggagagagacctgcatgtacaagggcatggagttatggaagaacagagtgcttggcatgttcagagactagtggataagtctgtacctgttctttatattcacgtattgcaaaagataaagccagaaaggtaggatcaaaattgtgaagttccttatgttctatacagttgggcttggtctttctcctatgggtattgaaagggcagtcaatggcaagtaggccagtatttttaaaagtatcttacaaagattactctggcagaagtatgcaaaatgatctggaacagtccagactagtggcagggaagtcagttaagagtttacggcaatatccttcgcccactttttgatggggttgtttgtttttttcttctaaatttgtttgagttcattgtagattctggatattagccctttgtcagatgagtaggttgcgaaaatttcctcccattttgtagattgcctgttcactctgatggtagtttcttttgctgtgcagaagctctttaatttaattagatcccatttgtcaactttggcttttgttgccattgcttttggtgttttagacatgaagtccttgaccatgcctatgtcctgaatggtaatgcctaggttttcttctagggtttttatggtgtccaacaatgatagactggattaagaaaatgtggcacttatacaccatggaatactatgcagctataaaaaatgatgagttcatgtcctttgtagggacgtggatgaaattggaagtcatcattctcagtaaactatcacaggaacaaaaaaccaaacaccgcatattctcactcaaaggtgggaattaaacaatgagaacacatggacacaggaaggggaacatcacactctggggactgttgtggggtggggggaggggggagggatagcattgggagatatacctaatgctagatgatgagttagtgggtgcagcacaccagcatggcacatgtatacatgtgtaactaacctgcacattgtgcacatgtaccctaaaacttaaagtataataataataaaaataaataataaaaaaaagtttacggcaataattctgagactagctgaggaaccacagcttgagctgaggttgttgggttggaagaacattgctaagtaaaggttaaatgaacttggtgattgcctgtgtgaagcagagaagaggggtggggaggacacagtgaatctgaagattctaacttagggaattggctggtgctatgtcaactcagacaaggcatctgtgagaagagggctatttatttattttttaaggacaggaagttagtaagtcagttttaggatgatgagatccaagaacctctgagtatccaactggagatgtttagtatttagtcagataaagaagcctggggctcaggaggaaagtctagacaggagacatggatttgggagcatggggactaattattggtctgcctgaatcatgaattcacaatgctattaatataacctattcgtacagctgcattacatagatgtctcatttacagattctactctaataattcttaaatatttttacattttttgctactgtgtcagatctaccctatgctatacttgtatttttgcacctttttagactaagtgaagtagaagcctgttaatttatcttttttcaatgtcaatactattgaatattcaacaaagaagtggtcagaacttgggcttcagagcctagtagtcattggggctttttttctcttctcccggacacaatgccattatatccctcctcttcccccatctccaagtaagatttagctacgtgactagcttttagctcttgaaatgtgagtagacagatcatgtcatttctaggtagaaactttaagagttagtttgtgattcatcacatcctttttttctgcatctgcagccttggagatagaagccctaccaacaagggttccgaagtgactgtattgagcagagttctccatatgacccacattagacacgtagtgagaatgagaaataaaatgtactgcactaagccactgagattgacattgttgttatgaaagcataagctagccagtctggttggtaaagaggtaactagacatggactcaagtcctggctctgtcactaactgactaactgtaaaaaagttacacaacttcttaaagctccagtttcttcatttttggaaataattatactgaatttgccaaaactctgtgagaattagagacaaggtatacaaagtaccttgtaaacaatagccatccgctacgtagccgctattaaagtctgcatccatcattttagatagttactcaattttagtgttttgattttgtaataccttatggtggctatcgctctcagatttgtgttgtgttcagatttcttgaaaatgttttctccatgtttatctgagaaattgttaaaaataaaaataatgaaagcaagatatggccaaggacaggactgagtggtcatgctgacatagatcttttcacatttattaatggctgtctttagataaagttgtaaaattaattcaccttgcaatggccccaaactccccatcttgtttctgaggatacagaggtttttttttcataggtatcctataaaagagttgcttagccagtcaccttgctacgactgcataagatataatcacatcaacttcttaaacatttgtaaacttcttaaacatttgtaaactatttgttttgtggtatgttggctttttgtctcaaacagctgattgttctgtgtattatgaagtactcaaatcatttctgagccattatctttgctcacaggataattctacatcaaaacttctgtcattatgctattatagagttatttttctatcatgatctgattgcctgcttatactatccaccttatttaaaatgcttcattggtcacacaagattttatctatttgtatataaactaaaattcaaaatctacttatggaaaaatatctcctatacccttgatctatgtagatgacaaactcaactcttaggaaagagaagaagggatgataggaattacatctcataatttcattttgaaaaacaaaagttggttggtatcatggaagagacaggaatttcaggagagagtgaccttagctaatatacagataacaaaactgtagaaagacaagagtattaataaggcaaatgtatttgtagaatagcagaaagaaaggattaccttcagaggtaggcttggtataaaaggaagtatctcttcttatgatggacgagctataaagctataaagcctatttcttccaggggtgatacagctggaaatatgcttagattctaaataggtttagatagatttataaatacatcaataatgtaccatcaagggcaggacaggtcataggaacataaatatgatatttttgaggggaactttgggtggcctatcacctcatactcttaagagaagacttatgttggatggttcagcagcttgaccaattttgggacattcctttgttcttataagtgttatcatagtcaaattactcagaggaacaaatagttacaaactccccgaggtcttagatgacaaaattatatatatatatatataatatatgtgtgtgtgtgtgtgtatgtacgtatatatatgtatgtatatatgtgtatgtgtatatgtatctgtatctgtatataagtatatgtatatatgtgtgtgtatatgtatatgtatgtatatatacatatatatgtatgtatacatatgtgtatgtatgtatatagacactgacattactcataattaaaaaacatcttaacatttttgagaaagaggcaaggacttcttttacgctgtatgacgggaactagagaatgttgaaagtcataggtctgaaaatgtttaattacaagtgcgttttctttaaaatctatccttcagttgagatgacagtagctgtcaccacacccctttccctaggtagccaaattaattgggaaaagaaaaaatgtgttcattggagtggagtctcacacactatcacagtgcccttgacagcaccctgttgtggcccctgttccacctatgtgatggcctttcagacatgacaaacagtttttctagtttctttaggtgaaaagatttaactgccaattaacgagacaccctaggtttaaaaaaaagtgaccgtaacttcataattttattttcctagcatctgttctattcaagccaagcctactgcggtgatcttcatcaagacaattcaggggtttcctagcaaccaagtttcctgtggtttccttggttatatgtaatgacataactcttatgggcaacttcacaaaaacacagaagaaagccctcctaaagaatgaaattccaaaaaaaatcaggttactgctcactgagtgtctctgtttaaaatggagaaatttatcttcgtgaatgttaatgacactaataaataattatgtagcaattgcaaagtaaaatcacatggttatttgatttctttcattgtttttgttatatgcctgatcttaatttgatttctgaaatcaggatcctttttccatctcttctaattgactgccacatacttagacatatccagcagatgaaaattagacagttaaaaaaattacatgagaggtcatttattaaaatagcagagttgtagttgctcaagagtaggaaccaataatactgcctgttttttactaataaagtatattatgaggtttgtatggcagtatcaagggttattggtggaggccattaaataactgttaatgtatactgagaagtaaattttccatgccagcatgaccaacattagctacttttatgtacttaattgttttttccttctatattcacaaagacaaattatactgggtaactgtaatctttggtgatatatctaatatccataatatgtcaaccaaagaagaaatataaatttacacaattaagagtaaaatttgtgcaacatcggctattcatccttgcattttcagtgcctatcatacaaggcggcttgtgataaatataaaatattggattaatgaatgaccagggctcaacaactcctttggtttttccagtggaaatcagaatttaatatgaggatccccagattaaagtaatgcacacttagaaaaggagaaaaatataattaatacatcagaaatttttgagttagagtacagtaagtcctcacttgttgttgataggttcttggaaactgtgactttaagtgaactgacatactggatagtagaactaattttaccatagtttaattgatacaagcaagagttcagttcctacagcatacagtatatacagtaccttgtttcccttaaagtcacacttttcaagaatctatccgtgaggacttaccatatatattcctctgcatactattcatttattaattaaatatttattatggacctattaggtaccaggttctgtgccaagtgctcagagtacaactgagaacaaaattaaatatgattacagcctcaagaagcttgaaaattcaaaatgtttaggaattataaattagctaaatgataatacaaacaaaagtacaaatactgtaaagacaagatactgtaaacacaagatagattaagccacgagtttaacaaagaaacctcttctgatctgggggtagagtgtccagggatagcttctcaaaggaagtagcatttaagctgagagatgaaggcctaggtaagcataactgggagaaagttgggtgtgggtggggaacagcagagacaaaaggataagcatgtgcaaagactttagaggagcccaaagaagcagagagacctggagttctcatttctgtcagtgggaatgaacctagaatgagaggagatttcagagggtttcaaaaggattcctataggccatgttgagcatttagcagaaacaatctagaaaaagttcggaaatgtggttcatagttacaatttaacctttgtagtattaaatgtatttaaaaaatcacctaagactttgatctgagggtgaaagtttaattctgaagttactgaaatagttgagccccagtaggacagggtttgtggcatgaatagggcattcggacagactgtgctcatggactaggggtcaaaccaaggagaagctgaagtccagcagcagtgtcaattatccaggcaggaagattgaaggcctaaggctcagagcaggcaaaaagcatggtaatggggtggggtggagaaaatagcacttatttaagatgattttattacgtatttgtatatacattatttcatttaattctaaaaaccacatgatgaggtgggtattgctttctccctttttatattaagaaactgagaaatagaaagtgcaaaaagcataccctggatgacatgataccagtgaggctgggattaaaatctaggactttcttgagttctaaaattgtgcttttttttcagtgtaatacattatatttccactcttctgtgcagtaacttgggtcagagtcttgatatcaatatggaccgtatgtcatagctgaccacagccaatgagagaggaagatatttatcccaatcttgctttcctgaggcttctaaccaataagctatactaagcctaacttagttgaagaaaatgccttctttaactttatttaaatagaaccacttatttatgtatttatttatccaagaaactttattaagttatctttaaaatcacatgcttagcaatcattttgaaagtgatgcatttggtatttgatgtattcaattctgcattgagatgaggggaaaaaaagcataacacaacttatgccgctcatatcattaagacaaatatggaaaagtagaagggacccagaaatcatttgggcccttgatgttctttcattcattcaatcaattttttattgaacttctcctatatgccaggcacagttttaggtattctggatattccattgaacaaagtccttgatatcatgggaaatagacaaaaacacataatctaataaattataattcatagtcaggcagcaagaaataatatgaagagaaatggatgagagcattaaaaagtgatcaagtaaggcctccctgaggcagtgaaatctgactagagaccagaaagaagctaaggagtgataaatggaggaagacaattcaaggcagagtgaggagaaatctcaaatactgagacatacagcatgcttggtaggttggagaaatgactgcgcttcagattttctgaaaacttagtgattaatgatttttcaagctaataaactgagtttacaatccttgtataacagaagagactcaaagatctaccatttagtcaaggagctatgcagctgaaactatataaatccaaatctagcctcatttaatatgaacaattgtgttaaaatcaacttcttttctgcattaagatttagtcctttaaagttttcaattagcaatgactgcgcctcagataaacctcattggctatgatattgctactgtgcaaagctgatttagtcctttaaaaactaaaagccactctcttggcttacgaactttgagaatcactttagaattgtttaaggcaaagacacaaactgggttaatttcatagtaaagatggttctctgttgtttgcacagtattttattaattccagaatcatggaacattagaacttaaagtgatatctgaattcatctaaagcaccataatagtagctaacatttatagggccagctggcattctaaatgcttgactcatattagcatattttgtcctcataacctttgcagacataaatattatgcctctgtttttaaatgggggaaactgaggaatataggggttaagtaattttcccaaggtaatacaactattaagcaatgaacctgtgcagtctgactctaaagtctttgcatttaaccattgcatactagacagttggaagaaactgagactgactggttaagtaaaatttccaagatcacacctttggaaagcaaaggtggaatttcagccttgacctgtatgcccttagaatttgagttcttaattactattctgtgctacaagcatcattcatcttggtgaacatctagtttaaactccactttgagaggtaatattattcagtagagtgtacatagactttttgaactagaagagtctttttttaaattcaattatatacttgctattatagcttgcaatcttgagcaaataacttatttaagtctcagtttgcttatctataaaatttgggtagtcatacctgccaaattacattgtagagagaaataaatgatgtattgtgtctaacatagcattgagtatgtatgaggcaattgacatatggcgcaattactgtaattctggagaggaaactaaggtcaaaggaactgtgtcacatagctaatagtggaatacctgggatacaaatcaggttccctgattattatatttcttgccttgaactaaaaaagtactaagtagtgacaagattcacagaaaaataacctgccaatttctccatatgtctgttgttattccaactcagaatctgtgatattaatagccatagccaatttgctgaactcctagtgtgaaccatgctagttctctatgatatatgatgtcatggattgctgtgtaatatcatatgtatcactcttgctttcccaattagatcataacaatcatctcacagggatttgtttcttgtttgattgtttttgtgtttcttctgtatcctcgagcttcaccttcaagtgtgggagaaaaggtcttttatgttaacccacaaatcaactactttaactgcttcttaaatttttaaatattttattttatacttttaatcaatacatgctattgtaaatgtttatgggctacataatgatatttcaatacatataatgtgtattgatgagatcaggataatcagtatatccattatcctcctaacttatcattgctttgtgttaggaacatccaatattctccttctagctagttgaaactgtatattattgttgactatagtcatcctacagtgctatagaacactttgacttatttcccctatctagctataattttgtatcctttaaaaaatctgtgcatatacccttttccttacccttcctagcctctagtatcctctgttctatttttcacttctataagatcaacatttttagcttcctcatatgagtgagaacatgcagtttttaactttctgttcctgggttttttcactgaaactgctttgttgagagatcatttacatgcaataaacagtatcaactttaaatgtacaattctatgagtttcgacaaatgcatacagttgcataacaaccaccacaattatgacatagactactttgtccaaaatggctgccacttgtggctactgatcacttgaaatggggctagtcctaattaaatgcggtataagtaaaaaaaatcatatatatatatatatatatatatatatatatatatatatatactgcatttcaaaggcttagtataaaatttaaatatctcattaataatttatgttgattatatattgaccatatttttatatatcaagtaagtatatttaaattaatcttacttttttacttttaaatatagctagtaaaatattcaaattacatatgtgactggcactatatttctattgggcaatgttttcatagaacattgtgaccacttctaaaaacttattccttgccactttctaaacaatctccttcctgcacctgaactcttggtgatcactgatattccctctgtcactatagttttgccttttttagaacatcaaatagtgtgtagtttttcatatctggtcagcataatgcttctgagagtcatccatgtttttatgaatcagctgtttgttcctttattgttgagtggtatttatcatggatattccataatttatttatgtacttctcagctaatggacatttgggttgtttccagtttttgattcttaatgaagctggcatgaacatgtgagtacaagttttgtatggacatagtttttcatttctactggataaatatatcagaaggggattactggatggcataataagtatacgttcaactttagaagaaactgccaaactgttttccaaagtggttataatactttacatctccactagtaatgtatgggagtttaagttgttccacattttcaacagctttgtattgtcagtcttattaaattttagccattcaagtggatgtctttggtatcacattgtgatggttttcatttatgttttcctttataactaatgatgttgaagatatttgtatgtgtttatttgcctgccattcatatttcttccttggtgaaatgtgtcaatcaaatctgttgcccatttttaaatgttatttgtcttctaattgagttgaaagggtgaagttatttataaacactggatatgatagtttctatttttacatcttcaaatttacttttttttctgcagtgtttaatatcatggcaatacaatgcattgtaatttttcattgcagattttcttctctaaatttccagttggctcttggttatagcctatacttttttcttccattattttatattactctttctctctatcttcttgaacaaatgaaacatttgtagtacttttttaaaaagatccttgtctacaaattctattatatctgttatttttagtcttttaatttgtttatttctctattgtttattgtcctcgtttttctatctttttattaattattggactttttagataatacattgtttgctgctgggttttttttttttgtattttttaaagtggtgatagattttgttctggcaccattgggatactttttgaatcagtttgatccttctgaagcttacttttaacctttattagaattggcccagagcaccaattagtctagggttactactatggtgataactatataatgattcttgcggatgctccatgtaaacacactgcttggtagaaacatgaattaagactaactctatgtaagctctgacagttgttcagagtcaggttctttcttcagcattgggtagtttcctctcacacaattgcatatcagtcttcagccagactcaaagggatgcctcagcagattctcagagctctatctcagtgcagctccttcatctctggtacttgttcttgcaattatagccatttggccttccataaactctgatctctaccttaactcagaacaaatgccagtctctgtctgggttccccatctctgcactgcagcctagcaactgctttcaggctgtacactggacgttcattgaactcaccctgcttctttaccttttctcaggaatcatgatccatcatttcatagattttctatttcattattccatcatggctggaagcataaggctagatattttaactttgaaataaaatatcatctctgaagcctgcaaaggttacatatgcagcctgagtttttcctttccattgacagttcaaaacatgggcactctgcatgggtcttcaagaggttagttttaaatttttgctccctaggttccaagtaaaacccagttagaaatattaacactttaacattcaagaaagaaagtctaaagactataatgggcgtacctgttgctaaatttgtaaggtttcatttctaaatcaaattagagcattaaaaagcaacttaattggagtacttttctttaactctcccacaaatggctttgctcagctatatttcattattgtgcttttagctttcactaaggccatacaaaaacatcacaccttctggtaacacatgcacacacaaatatagatacagtgagaattgaattaccgtaacacatctccatcacttcctactactaaatgtaattctcagatcctttgttcctggcttggtgaaaatcttgaaaatttttttaaacaatttcatttcattttaagttctgggatacatgtgcagcatgtgcaggtttgttacataggtaaacgtgtgctatggtggtttgctgcacctatcaactcatcacctaggtatggccccagtgtatgttgttcccccgcccccgtgtccatgggttctcatggttcagctccaacttataagtgagaacatgcggtgcttgattttctgttcctgtgttagttttctgaggataatggcttccagctccatccatgttcctacaaaggacatgatctcattcttttgtatggctgcatagtactccatggtgtatatgtaccacattttctttatccaacctatcattgatgggtatttgggttgattccatgtatttgctattgtgaatagtgcttcagtgaacatatacatgcatgtattgaagtaatacattagtggatgccacttaatgtgtttttggtagttttgactcttatttcaacttcattgttctaattcctttttctttatgtcattttgatttttaatggaagaattacattttaaaacaatgagtgaataaaattgtttttctattttggcaatcctaaacacatagttgatattcagtaaactctgataaaatgaaagtaattgctaatagactaagctagtgaacatatgcaagaaattgattacaagtccatttatctcagtcccaagcacatattgacacctacaatatataaaatgttgaggtgggcgccaaaaaataaactgacagagatgtggtcttgtcatggagcaatcacttatgaatttgattttgtattgattcagtcagaacagattgctttctctgcttgaaatgctgccgcttcctgcaagacaccatactcagataatctctcatgtttcttacttaattcaagcccttcctttaacatcacttcatcaaagaagtcttccctggccatgtttcctaaaatacaattacctgtttatattttattctcttactctgtttgtgtctatatgtatatatacagacacatatatatgtacatttgagacagagtcttgctctgttgcccaggctgaagttctgtggtgggatctcggctcactgcagtctccccctcctgagttcaagcaattctccttcctcagcctcccaagtaactgtgactacaggtgcgcaccaccacgctgactagtttttgtatttttagtagagatggggtttcctcatgttggccaggctggtctcgagctcctgacctcaggtgatcagcccgccttggcctcctaaagtgctgggattacaggtgtgagccactgtgtccagcctgtgttcaaatttttctttcacttctaaccttaatttcaaagtaagatctgtgaggatagggatttgggctgatgtgttcaaacagtatccatgagtcttagaacaatgactagtacatgtaaatgcttaataaatattcacttaatcaataaatgaatttaaaaagtgaatcctctatgattaatctaatcatagatatgtttaagtttagcctgaattgtctgtagcttgccagaatttccactggtagccagctgtgtttgaactcatgaaaaatactttccagcttcactgttgttgtgaggagagtattctatgtgtggaggttaactgcacatccccaaagcaacattattgctgaataaagatgcctaatgcctttactattaattatctgtggctatgctaaactgtaagcttttgagtttttatctttgtattttaatagttaatttgaatagaacccagtaatatttttatttttattttttattatactttaagttctagggtacatgtgcacaacgtgcaggtttgttgcatatgtatacatgtgccatgttggtgtgttgtacccattaactcgtcatttacattaggcatatctcctaatgctatccctccatcctccccccaccccacaacaggccccagtgtgtgatgttccccttccagtgtccaagtgttgtcattgttcaatttccacctatgagtgagaacatgcggtgtttgattttttgtccctgcgatagtttgctgagaatgacggtttccagcttcatccatcttcctagaaaggacataaactcaaccttttttatggctgcatagtattccatggtgtatatgtgccacattttcttaatccagtctatcattgttggacatttgggttggtttcaagtctttgctattgtgaatagtgccacaataaacatacatgtgcatgtgtctttatagcagcatgatttataatcctttgggtatatgtccagtaacgggatggctgggtcaaatggtatttctagttctagatccttgaggaatcaccacactgtcttccacaatggttgaactagtttacagtcccacaaactgtgtaaaagcattcctatctctccacatcctctccagcacctgttgtttcctgactttttaatgatcgccattctaactggtgtgaaatggtatctcactgtagttttgatttgcatttctctgatggccagtgatgatgagcattttttcatgtgtctgttggctgcataaatgtcttcttttgagaagtgtctgttcatatcctttgcccactttttgatggggttgtttgtttttttcttgttaatttgtttgagttcttcgtagattctggatattagccctttgtcagatgagtagattgcaaaaattttctcccattctgtaggttgcctgttcactctgatggtagtttcttttgctgtgcagaagctctttagtttaattagatcccatttgtcaattttggcttttgttgccattgtttttggtgttttagtcatgaagtccttgcccatgcctatgtcctgaatggtattgcctaagttttcttctagagtttttatgcttttagttctaacatttaagtctttaatccatcttgaattaatttttgtataaggtgtaaggaagggatccagtttcagctttctacatatggctatccagttttcccagcaccatttattaaatagggaatcctttccccatttcttgtttttgtcatgtttgccaaagaccagttgtttgtagatgtgtggtactatttctgaggcctctattccgttccattggtctatatctctataatctaagatcttttagagttttttgggtttatttttgtttttaagaagaagatttctgcatcatacaaatattctcctttaaatatggaatttcatcatcgtgtttttggggagaatggatgtgtatacctaaatattctttattttgaaatgtgatgaaaatgtaactagtaccagacagactgaattctgtaaatcagaatttattattctagcagcacatgggaaatattgaaattcattttgctgtaagtatagctggtgaagtgagcagtattgttggtttagagatgttgatgttttggaaagttgccattaaggccttttaatcttacattttggacttatgagaaaaatccccggggctattctaaaatcctaacagatgccttctgctaaaatgcgtacaaaatatatctctttttctatattagactttcatatttatttaatacaggaaacaaatatcttttgtattagaaaaaaacacaaatataagggatctgcaagatcctttagatctacttcttcaatttccagttgaaaagactgagactcactttcttgagtcagtacaggactttatcaatgacaggaaattaataacaggcagttctagaaagcagaaacctactattcaaattactaatatgccaaggtttcaaatagtttagttattgtgccttaaatattgttacaatagtattattttcccattacaggtatgtataccagagaataaaccacagtctacttctaaggaaattaattatataaaaggaaggatcctatggttctttatgaaaacagtatttttttataaaactgatcaattaaagctcattattagcactgaagtagaattactttttctccctaggagaactgagttgtaggaatgctttgtaaatgtgtttttaaattgttgattttatttagaattggcatcttttgctaaagaatcactatgagtcttcaccgaaaggttgaaatgagttgttgctattgttgagcattgtggggtaagagaaatcctgcctcacgcaaatttatttacattgcttcatccctctctgtatcttcaggaagttcaaggacctgcaataaaactgatgctgaatgtatttctccaaagagttggaactttacaatatttgtccttttcctttcttcagatttctttttcttatcctgcttcctattatatgtcttaaacttttgatatgaggccagcatatgtgccattgaaaatggtcttagagtttctcttttagtgaaattgaatattctcccatacatattaatagtgatatggtttagacaataatttagcatgataaagctctagaagcagccttggcttttctagtgaacatcatggcaatccttttaaacttattggtttagtatggtataaaactcacaggtaaaaaagaaagcaaataaatacaaatagataaataaggtatttccatagcattcagttggtgtgacaatcattatacacaaaaatttgctctagagatttccccctgtgcaatctgttggaagttgttgggcttccatgtggtctctgaatgaaattcacttttcattacaaaaatctttttatactgaatcatatgctccattactttctaggaaatgggaaatcattgcccactgtattgcacaaaaacataccaactacctacaaatgaaattaagatcgagaggcattatttttttattatttctttattttattattattatactttaagttttaggttacatgtgcacaatgtgcaggttagttacatatgtatacatgagccatgctggtgtgctgcacccattaactcgtcatttagcattaggtatatctcctaaagctatccctcctccctccccccaccctccaacagtccccagagtgtgatgttccccttcctgtgtccatgcgttctcgttgttcaattcccacctatgagtgagaatatatggtgtttggttttttgttcttgcgatagtttactgagaatgatgatttccaatttcatccatgtccctgcaaaggacatgaactcaaccttttttatggctgcatagtattccatggtgtatatgtgccacattttcttaatccagtctatcattgttggacatttgggttggttccaagtctttgctattgtgaatagtgccgcaataaacatacgtgtgcatgtgtctttatagcagcatgatttatagtcctttgggtatatacccagtaatgggatggctgggtcaaatggtatttctagttctagatccctgaggaatcgccacactgacttccacaatggttgaactagtttacagtcccaccaacagtgtaaaagtgttcctacttctccacatcctctccagcacctgttgtttcctgactttttaatgattgccattctaactggtgtgagatggtatctcattgtggttttgatttgcatttctctgatagccagtgatggtgagcattttttcatgtgttttttggctgcataaatgtcttcttttgagaagtgtctgttcatgtccttcgcccactttttgatggggttgtttgtttttttcttgtacatttggttgagttcattgtagattctggatattagccctttgtcagatgagtaggttgtgaaaattttctcccattttgtaggttgcctgttcactctgatggtagtttcttttgctgtgcagaagctctttagtttaattagatcccatttgtcaattttggcttttgttgccattgcttttggtgttttagacatgaagtccttgcccatgcctgtgttctgaatggtaatgcctaggttttcttctaggatttttatggttttaggtctaacgtttatgtctttaatccatcttgaattaatttttgtataagatataaggaagggatccagtttcagctttctacatatggctagccagttttcccagcaccatttattaaatagggaatcctttccccatttcttgtttttgtcatgtttgtcaaagatcagatagttgtagatatgtggcatcatttctgagggctctgttctgttccattgatctatatctctgttttggtaccagtaccatgctattttggttactgtagccttgtagtatagtttgaagtcaggtagcgtgatgcctccagctttgttcttttggcttaggattgacttggcgatgcgggctcttttttggttccatatgaactttaaagtagttttttccaattctgtggagaaagtcattggtaacttgatggggatggcattgaatctataaattaccttgggcagtatagccattttcatgatgctgattcttcctacccatgagcatggaatgttgttccatttgttggtatcctcttttatttccttgagcagtggtttgtagttctccttgaagaagtccttcacgtcccttgtaagttggattcctaggtattttattctcgttgaagcaattgtgaatgggagttcactcatgattggctctctgtttgtctgttattggtgtataagaatgcttgtgatttttgtacattgattttgtatcctgagactttgctgaagttgcttatcagcttaaggagattttgggctgagacaatggggttttctagatatacaatcatgtcatctgcaaacaggtacaatttgacttcctcttttcctaattgaataccctttatttccttctcctgcctaattgccctggccagcacttccaacactatgttgaataggagtggtgagagagggcatccctgtcttgtgccagttttcaaagggaatgcttccagtttgtgcccattcagtatgatattggctgtgggtttgtcatagatagctcttattattttgagatacatcccatcaatacctaatttattgagagtttttagcatgaagcattgttgaattttgtcaaaggccttttctgcatctattgagataatcgtggtttctgtctttggttctgtttatatgctggattacatttattgatttgtgtatattgaaccagccttgcatcccagggatgaagcccacttgatcatggtggataagctttttgatgtgctgctggatttggtttgccagtattttactgaggatttttgcatcaatgttcatcaaggatattggtctaaatttctcttttttagttgtgtctctgccaggctttggtatcaggatgatgctggcctcataaaatgagttagggaggattccctctttttctactgattggaatagtttcagaaggaatcgtaccagttccaccttgtacctctggtagaatttggctgtgaatccatctggtcctggactctttttggttggtaagctattgattattgccacaatttcagagcctgttattggtctattcagggattcaacttcttcctggtttggtcttgggagggcgtatgtgttgagaaatttatccatttcttctagattttctagtttatttgcatagaggtgtttgtagtattctctgatggtagtttgtatttctgtgggatcggtggtgatatcccctttatcattttttattgcatctatttgattcttctctcttttcttctttattagtcttgctagtggtctatcaattttgttgatcctttcaaaaaaccagctccgggattcattaattttttgaagggttttttgtgtctctatttccttcagttctgctctgattttagttatttcttgccttctgctagctttgaatgtgtttgctcttgcttttctagttcttttaattgtgatgttagggtgtcaattttggatctttcctgctttctcttgtgggcatttagtgctataaatttccctctacacactgctttgaatgtgtcccagagattctggtatgttgtgtctttgttctcgttggtttcaaagaacatctgtatttctgccttcattttgttatgtacccattggtcattcaggagcagtttgttcagtttccatgtagttgagcggttttgagtgagtttcttaatcctgaattctagtctgattgcactgtggtctgagagacagtttgttataatttctgatctttcattcattattttcagtgcacacctgaattgagaaaagcacattaatgaacttgggttgttgatgtcaacccattttcctgtatttattaaaaattatcatgtattctgagcttaaaaattgttttgatttcttcacttaaaaaaggttttcagctgttcacataatttaggaaacagcaaaacaaaacaaacaaaaaaaaaacctgccttcccatgagactttcatggtaagtccacctggatgaccaaaaatactttttatttgttagcattcttgctgcagaaataacatattgttatgcagatatattcacttcaaggcaaaacaccaaattattttctagtgtttttccctttaggagctttcatgattctaaacctttcatgagatagataaagtaagtctttctgaagattggatactgtaaaatccaaaactattctaagccaccaggtgaatatgatcaatctgagttgtgtaagcctcaactcaagacaataaaagctgtttgtagccttattgatgccaagtatatgtcaatataaaacaacagcaacaacaaatctcaaaacattgtgatgaaattagacttaagatatttaatttggatttttaaaaaaagatacacatttatttttttaaataattaaattgataaaaattatacatatttatggtacacagcatgatgttttgatatatgtatccattacctcacatacttatttctttgtagtgagaatatttaaagtctactctcttagcaattttcaagtaaacaatacattgttattaaagagtcatcaggctgtgcaatagatctcctgaagttatacctcctgtttaactgaaattttgtaagcctttcaccagggtcttcccaatccctgtcacctgcccaccccagtccctggtagccatcattatactttctgcttctttgagtttgatttcttttttttagattcatccacttggattaaaaactaaaacataagacctgagactgtgaaactactagaagaaaacataggggaaaagcttcttgataatgggcaaagattttctggatatgacccaaaaagcacaggaaacaaatgcaaaattagacaaatgcgattgcatcacactaaaaagcttctgcacagcaaaggaaacaatcaacagagtgaagagacaacctatggaatgggagaaaatatttgcaaaccacacatctaataagggataatatccaaaatacataaggaactgaaacaactcaatagcaagaaaacaatccaattttttaaatgggcaaaggacttgaaaagacatacgaatggccaacaggttcatgaaaaatgttcaatgtcactcactaatcatcagggaaaggcacgttcatttcagtatcttttattaatgacattatggtatctatatatatctgttagtattgatttttaattatagcatccaaaatattcagtttctgcttacaaagctgttttaagttattttgattcaactgactcatcaaatcaaacaaatgatttgatatcattttccaatgaaattaaatttcttaatttctgtttttgactgaatgcagataaaactcttggtcatacagaaagtctgttcccacaccattgccctcattccattatatgcattttctactcaatgtcttcactgtagtattgatggtggatggagagataaagtctgcattaactgaaacaagttatttgaatatcccttgctaatcagtaaggtaattaatgcattgtaactaggatgtagagcctgtgaaaccctgttgtataatgccatggtacagacatatctaaaatagaccaacagatgttttgagaaacttcttaaaattttctttgcttctttggagtttctttaccaaattataagtaagaatacaaatgtagttggtgatgatgagataattctttgagcaaaacaatagagctgtagatgaggttaaaaagttcatattaatattgtcaagaattttttcatatagaagtaattttatttttcagatttttgaaagctggagagatgaggatgggggaatgaaggagcagtaaggtttgcccaattgatgacacatttatgtataattttttcatgctttggaaaacaatttaaaaaaaattgttccaagaagttttaagcacattatagatatgaattaactgcatagtattagtttaaaaattattagagcatttgttaatttcatatatgacagcattagataatactaagttctaatcttttgatttttctagctcatagccctattctgggtctccttttcaagttttttaatatattcataatttaatacattaccttttaaatattattttattttagatttaggggatacatgtatatgtttgttacatggatatattgagtattggtagtgattggacttctaatgtacccatcacccaaatagtgaacattgtgctcaataggttatttttcaaccctcacccttttcctctcattagtaatttttttgcagtaggtatttttgttaggctatcagacgttgaattagtggaactcttcttaaaatgacccataggtgactcagttcatttctgtgcagtactcttaaaatagagatttttctgactttctagttgagaaagatcatgtaattcattgtcaaaacttttaaatcaaaatgctagccttaatataaatttccaacactgcagtggagtcagggtaccatataaacctgattactgtggcaaaaagcttgaagctttcataaatgcagaacaatgctggtaaagaggaacctgattttaaaattattgcttaaacctaggttttcaataaagagcggaaattgatgagcgtttgagggaataataaccaatggttacagtcaaaatggtaacttctgtgacatttctaagtatgcaagtgtgagatggaagtatttggagggactgagagctcttcactacctctaatttaggcagctttcactagattgggagagttccaatatatatacctagttgcaggtgtccatccttgaagaaagtgaaaaaggtcaatgaatgaacagattccacaagtcttgtctgctactaaaccaactggtcagtgttgttgtggaaataatgtgtgaaaagcatagagcacaggtcctggcacatagtaaataccaaatacatggtggatattactaaaggaggtagcaatgcttattagctaaaagcatagattctgaaatttaaccatctgtgtttttgtcttgcttccacaataacagctgggtaaacttgggaatgttatttaacttctctgaggcttgtgagataaaaatagtactacctcatatggttgtcaaggaaataaacgagaatatatataatgcgattaaaccaactcctagtatgtagtaagcactcaatgtaaatatcagttatttctactacaactgcaactatgatgagggtgatgactatgactgctatcaccactgccttctgcaactactgctgtctggcctatcttattaggaattggctgggagcttgtagaaaagctttggaaaagcagaattggataagtcaggacctgactaatctgaccaatttgggcagagctgaagcttactttgtaacgccctggaagcaaatatggaaaaacagattatcatgaggattaaactatctgataaaacaaaacacttttagcaagattatcaaattatttataagtaaatcatgaaatggtgctattttaatcacagatttaaggcacaccaaattcttaccccacatgaaaagacctgaaccccaagatttaagaaaaaacttatatacactttaaaataattttctaacagttattttgtgtgctgcaaaagaactgacatattttcttattgtgtaaaatatatataacaaaatttattgctttaaacatttttaaagagtttggtgacattaagtacattaacactgttgggcacccatcatgaccatccatctccagaatattttcatttttccaaactgaaactctttacccattaaacaataattccacatttccagctgccttaagttcctggcaaccaccattctacgttttgtctctacacacttggctattctagacactgaatataagtagactcatagaatattgtccttttgtgtttggcttatttcccttggcatagtatcttcaagcttcatctatgttgtagcatgcattagaattttattgttttttaaggccaaatagtatatttcattgtatgtatatgccacattttgtttaatccattcatccgttggtaaacatttgagaagaaaggcactgtcctcaacttgatttcagctttctcactggccatggatctatcagtgatacgttctataagatccatctattttggcctgatttgtagttgattaggagtcatacttctttagattaggtatttttgtcttgtctggttatggtttcttaccaaaaataaacaatgccagggttcactataatcattgtttcttaataatgaagcaactaaatggtaccaggttctttggcaagactaaatgttttatattggaaacccacaatttatgaatctaaatgaatctggagctctgacattttagaacctttgcattttgttcaaggatgaagatgaacaaaattaccaaagagcaatgtatataaaaagttgattaatttatatacattgagtacttgttacaggcaaagaatctcccgaggtgctgggaggattataaaaaaactgtaactaactgagtcaggcttatgaccttacattaatttttggagaacaggaagacatccctgaaaaataaaagtactaataaaaaggtaaattttttttctaactcttccaaatttaatgttcttgtattgcttgcttttgtacttttcatttagatcatttattacaatttataatttatatatttggagaaattattgattgaatgtctgcctcaccccagactataatgaggacagaattgaggtcacgtctctaccagtgtgactaggaacattggtaaatgaccattgaattaattagttaagtaaccacatgagcacaaatataaaatttaagtcatgggtcagtagccgaaagaagataaggaaagatttactgattgtctacaatgagccagctgctttacaaaggtacagatgacaattacaggctaggcagtgagaacatatctaactctgcaggaccctctgccattgatgctgcctgactgttacacagattgagtctctctttatctcccttgtcacttgtgttttcctgtgtcacctgtgttttccttctgtgcctctatcattattgcctcaacaccttatcatatttaataattttaaattgtttttcagtttaccaatggcttcatgtccatccatcagcaaatcatcatagcaactctccactttacaaaggaggaaacagactcagagaaatgtgatgactatcccaagataccacaaaagtaaatacagaacaaaacttaaaactgggtcttccacttccaaagctagtgctgccccaagcgatgggattatattgcactttgtagtgactgtgacagcttttaaagtgaccaagtttctttttggttccttttctctcttggtgtagagtttttgagacacaattgcatttagaattctcaagtactgaaaggtgcttttccccatggatttgaatcaagtgtgcgaattgcatccaaaaaggttaatctgtttacccaactagaacattttgcactgcagaaataaaactagaagttgcattgctgggctgctccagatgtcctgtgctttgagctgctttatttgcatttggtatttcaaagcttgtgatcaatttacaattataattgtcaccaaaattttactttaactagcactttgggaaggaaaacatcaatttacattattttgcagagtttgaaaatatctaatgatttataaaacaaaaatgggtttcatcaagacaagtgagtacaaaattgctgttgctgatctatgttgtaatcatttcctaatacaagatcttgttattttcatacatgcattttgtattcactatgctagtccataataagataattttaatcactgagttatacagctgctctaagagagtgaagagcataaacatgaataagaaaatcagacagctgattataaaaatgtattattggatatctgtcttggcggcacatgtaactagattaacagtgagcatgattccatatgtaaggtgtttcttacttttcatatctcctttaagatatgcaaagatatatttactttatatactatcaatagaattcttgtcagtggagttagaggaattcctagaaatagctcagtttctttaaactataatactaccagaaagaaaagacgtcataaattatgtatcaaatatattgttttgagagtcaatagataatagcaaacatttattaagtgcttgccttaagctaggctctgtgctaagaacattatgtgcataaggtcatttaatcatttgagagtaagcacttctactattacgaattgctatggcctgaatgttcgtgtctccctaaaattcacatgttgaaaacctaattaccagtgtgatggtattaaggggtgaggcctttgggaagttattagatcatgagggcagagctctcataaatgggattcatgtccttataaaagaggcccgagagagttgccatggcccttccacgatgtgaggacacaacaaggaggcgctgtctatgaaccagaaagcaggccctcaccagaaaccaaattagccagcaccttgatctcggacttcacaacctccagaaccctgagaaatgaatttctactgtttatgagctactcagatgatagtattttgtcatagttacctgaacagactaagacatgaattctatctcaaagatgaggaaactaaagttgaaagtggttaagtttctgaaggttctgcagccagcaagagatatataaagtaccaaataataaaataaattttcaaataaaagtcaaatccaagaaaaggcagaaaatactaattcttagttcagaattttattattagtctgaaaaaataacgtaacttatatgcaaattatacaagcttagaataaaaagaaaccccttaaagactctctgaaaacacagactatgtcttacttattttttcatctccttgcatacagtagcccacaatttttttttttttttttttttgagacggagtctggctgtgacacccaggctggagtgcaatggcacaatctcggctcactgcaacctctgcttcctgggttcaagcgattctcctgcctcagcctcccgggtagctgggactacaggcacacatcaccacacctggctgatttttgtacttttagtagagacaagagatcaccatagtggccaggccggtctcgaactcctgacctcaagtgatccacctgcctcagcctcctaaagtactgggattacaggcgtgagccaccacacccagtcatataaaaaatatggagttgaattttatccagtgtcagaaccttccaaaattggggagtttacaatccaatttattcttgagaagttccaggtatcaaaaaattcttttatcttttaagtaataatgtttctctccataatttccctttgttgaaattgtgtgatcatggagcctaaatgaccattggtaatataatattaatattcaaaatggatgatgcaattcatactgacctgtcagcagcccaatattaatttaaactactgacctacattaatttacctcagagcaatggttctcttttcttgcttactttcgggtcagcttcaaacacaccaatgccccgttttcacgacagataaattggtctgcatatctggagttgatctgaacataagcattttttaacaactccccagatagttctaatgtgcagccaatattgagactcactatgatagagaaatgcacactaaatacagagggttgttgccaagcaaggaactacctggctgcccagccaagacaatccagaatagcattatttttatgaattcatcaagcatttgggtccagaatttgatcttaaccttgcataaaagttaatcagaccctaggaaattgataatatgttaatcaaacatgaaattgtctcatatagaatatagaatgccagactatgggggcgtcccagtaggcacattcgctgtctgaaaacttgttcctctttttcaattagttgtgtggacaaatttctcagatcattgcactgaagagctagaatctgagtggaaatagttgatagtgttggtatattttgctgaagatgtgaagaatcttgataaaatgtccttgttttgatgataatgctcttttgtttaaattctgatgtcctatagattcaaggtcctctggatattctaaattaatattgccaagttaacttatttgactcctgtttttctatgactttgtacgtaatcctccttctttctttatatataatactttatcttacagttttagcattggcaacattctatttcttttatatttcttgattgtattagtgaaattctagcactccttaagcatggtttacagaatgcttatccaatgtgtggaagacagaaaccttagagggttagaacaaacattagaagagcagttcgttcttaacctacttttctgctgagatgctcattaaagttgatgttcacttgcatgggcatgcccggattttgaaaaccttgtcaaattatctctatttctgggtttttttttatctgggtctctctcatgttttaggctttcctcaaatgtctgatgattcttgattgtctgtttatatttaggaaagggtccattaaaaagctggtttggacctctgtgttcaagggtagtcctagctttagcataatgagacagagaaagcagacagggcattcaactaggtactttgtgctgggctcccttcctccccccaactcccaccacacacatcctggaaggcagcaatgcttctgtttcatcatacagcctagtcacatcctttagaattcttccaatttttttgcctcaagattggactgagggtgtcaacatccggaggtcagtataaagacccccccagcccaccaccccatgcaagatcttgctctgtcacctatgctggagtggcagttgcacaatcacagctcactgcagcctcaaccttcttggctcaagctatcctcccacctcagcctactgagtacctgggattacaggcatgtgccaccacacccggctgatctttgtatttttttgtagagatggggttttgccatgttgcccaggctggtctccagctcctgggctcaagcaatcctccatcctcggcctcccaaattgctaggattatgtgggtgagccaccgcacctggcatatataaagacttctagacaagggttcattctggttcccttttcagctacagccccaggatgtcacctggctgagtccatctctgcccgccctcattatttgccacccctccaatccagctttggtcttccaaagtgccggtgactgccccataccctctcttgatcattgtgtattgattgctttctcaaaaattccattttttattttttaaatatctaatgaggagaaggagacaattacctgtggataaaagaaaaacagacattcaggaaaattattgaatgtggactgcagcataggtaagtaggttgtagattattcacaattccattggctcaagctatattccatcactttgttttctcaagaaaagtcttactagttgccagaaaaaaaaaattgatgatcttatagagattttcttaaatcgaattcatgggccaagatacttgagtgttaccgagaaattacttcccaccctcttcacaactgtttataagtgaacactctgttgtgtcactgatttaaaagtgtcattaaaagaattgggagtccagaagaccttcacaagccataattatagaaattatctgggaaggtaacttttaatactggtggatataatattatgcttgagtgcagttggaagagatgtggtagaaacagacacagattttacctaggttttttttttctaagtttccagggccacagttatttctaaagtatttttgtatgttcctcataatacccagcatatagctttatccatagtgagtactcaatttttcattgataaagtgaggtagtttctgggatcctggcagcccacggacttataaaatattagagctgagtggaatttatcagcccatctgagttttctttggttctggtacatttttcttttctatatgtcattattacttaaaaagaggatgcatatgaaaatggatatgtacagataagatgtgattgcttctttttcttaaaaaaccaaaccctaaggaatcgccacactgacttccacaatggttgaactagtttacagtcccaccaacagtgtaaaagtgttcctatttctccacatcctctctagcacctgtggtttcctgactttttaatgatcaccattctaattggtgtgagatggtatctcattgtgattttgatttgcatttctctgatggccagtgatgatgagcattttttcatgtgtcttttggctgcataaatgtcttattttgagaagtgtctgttcatatccttcacccacttgttgatggggttgtttgtttttttcttgtaatctagaactagaaataccatttgacccagccatcccattactgggtatatgcccaaaggattataaatcatgctgttataaagacacacgcacacatatgtttattgcagcactattcacaatagcaaagacttggaaccaacccaaatgtccaacaatgatagactgaattaagaaaatgtggcacatatacaccatggaatactatgcagccataaaaaaggatgagttcatgtcctttgtagggacatggataaagctggaaaccatcattctcagcaaactattgcaaggacaaaaaaccaaacaccgcatgttctcactcataggtgggaattgaacaatgagaacacttggacacaggaaggggaacatcacacagcctgttgtggggtggggggaagggggagggatagcattaggagatatacctaatgtaaatgatgagttaatgggtgcagcacaccaacatggtacatgtatacatatgtaacaaacctgcatgttgtgcacatgtaccctaaaacttaaaatataattaaaaaaaaaccaaaccctattatttcattgacagattgtcttagagttgatagcattcaataattgagtaagtacagtccttccttgttcctaacgtgccctattttttctttcttctctacttttgcatatgcattttccctctttcttgtttcttggtgaattcctaaaccttttttttcaaaatcacctcaaatgttaccgctttgaagaagccttcctggattctcacaggaacagctaatgtcatctcttttaacatatccccttcttcatctctatgtatactgttcttcaatttcattttataagtagcaaaattcatccagagagatgaaggagcatttacaaggttaaacatcagaagagccttagagatccagaggaatctatttcagatccatgtaatctccatgtggccagctgggccatgtggcctagtctcgattttggttgaatttcaaaggtgttttatgaagaaataggggagtaaagaggtcagaagttcattttgagagatgctttcggaagacctctttaccacgtaatttgtgtattcggtggtgtgttttccactgtgattttggccagggtgcagctgtactgagacattcgttacattgagtcttgtagaatcaggtagggcctgaccttttaagaccattattatggagtagaacacagagaagctgcctctgcagctggcaacatgtatgggtaatggagcgtatcttcagactgtagagagaaaagaagtgcgtgtattcacttcccaggagaaataatattgtctctagcattctctataaaccaaaatacaaaagcagtcctgtgttataggactctgcccataactgatgttattgccacaattcccagttctgttttctgggcacaagcttctgctgggatttccaattagcagagggagctctgcaagagttttggattgtggacattgtcactgttctgggttaaattgtgtttcccccaaaagatgttgaagtcctaactcccagtgaatgttaccttattcagaaataagggtctttgcagataatcaagttaagatgaagtaattagagtgggccctaatctaatatgactggtatcttttaaaaaagagagaatttggaccttgggacagatatactcagagggaagacaacatgaagacacaatgagaatgccatctacaagccatggaatctctgaggtgaggctaccagaagcttagagagaggcatggaacaaagattttcccatatatccctcagaggggatgaatcctgctgacaccttgatttcagacttctaacctccacaactgtgagacaatatatttatgttgtttaagctactcagtttgtggtacttttttacaacagccttcggaaacgaatacagtcactaatttgctttcatctctgtgtcacctctccaaatgtcagctccttgtttccaaaatgagggaactagataacatgatctccagctctaaacttccctgatctttctagaagtttgataagctggttctgcagctgtgcctctcttcccacttcgtctttgattccttgacctagacccttggtttggatggggtatgcctaggagtagctcacccttctctgatctcctgggggaatttagttgaagtacattctcctcctgcccagtagtgatgtcaagaattagaggaaagacgtgctgtgtctcatacatcatggatctctgactccttctttccatcatatctcctgaaagtttcaggccagatattttacattagagatcacaacttggactcagtacacaaatgggttttatttgcctgtaccattttttaattttttaattaaaaaaattatttgccaggatgaaaattctaaggtttcacatcaaaatctgaatttctgacatagcaggccaggattcccacacaataacaatgactatttccagctcagttctgttgaaaggtggttgcctttgaaaaagtctgcactctctattttgcactgcctctacccctctctatttttccttcaccagctccaattctggcttctctcatgaatgctatctccatgggtcccacaggcatttgagtttgggacctctgtggacattatgatgagaactatttatttccctactattttatctgggagtacagaatttaagtcattttatatgtctcacatgttatatcagagtacattatatatctacaaatgtatatgccctttaatgattatgcatgtgtccccatagtgtcatgtacattgtggacactaaacaggtatgtattttaaatgtttttgtccactctctaaaaaccaatcttttggtaccatgaggtccttaaggatagaccagaaaatagtgctgcctcagggggttactatcctctctgaggaagtaagatatggagtcaggcaggtaaaggatcaagaagaaagtgaaaagtgcgaagacaaatgcaggcatagcatgaggataattcaggggaaggaatgagcacttctgagtggggccatcaggaattttgcagtggtaatgggggacattttagctgagacttggaaaaatggtagaatttgctccaacatgaggaaatatgagcattgagtaggcaggtatgggggcaattttgaaaacaaatagttcagtttgactgaactaagggaaatcgtgggaaatgagccagaggggataatttagaactatctaaccatggcatcaacatcaggtgtaaggagtttagacagcactgagttattaagctcctggaggagctatatttattctttgtccgtgagtaagaactagacaagaaagatgtgccttgcctctgttgttccaaaaggaaaatggccatttatgtttgcatctactctgagtttcgaggtagaaaatcttcctttttaattttcttcattcttgtatgagtagcaatttttagggaaagcagccgaatacagttcttggcagtatgttctaaaatagcaacacagcatccttatctctgctataacttcgtatcctccagctttctaacaggagcatattggcatctttcacagaattatgctcaacaacttattagctgttcattgagaaaacttatttgtcattttgaaacttgagtcaggtaaaacattttctttcacattttttctttctccttttcaccctctcaactttctctacttctttctgtctcatatctctcattgtctccttccgtccctgtctttcttccttcctcctttttcttcctttcctccttctgtccttcctttctcctttctccctcactgcttccttctcatctttataataaagcagttaagagcaacaactttgaagtcacatggccgaggctataatcctaggctactgactgattgtagaaccctgaaatagctacttagcttctttgagcgtccatttttccatctgcaaaatgggatcatgataataactactgcataagaatattgagaatattcatgtgttaacacatgcaaaacactcagaccatgtgccagggacatgttaagtgctcagtaagtgttgtctatttttattgttattatatctgctgatttttttcacatttatcctcactgagtttgggttcttttaaaattgtgtagaaaaatacattataattgttctttgtttaattttagacccaagagatatattttgatattaaaaagattttttgttattgtggaataacatatagaatccacaacctagatccatataatttgttaaatgtattattggactatgactgattaagtgggttaattttatacatgtaaccgtaagatcacttttagaagactatggccatattgtagatgccttcttctatttgctgattgagatagaggaacatgacatattttatgtataaggagtcagaggatcttgagtttctttaggatttttttctttctcttcttttcttttttttttttttttttgagacagagttttcctcctgttgcccaggctggagtacagtggtgagatcttggctcactgcaacctctgcttcccggattcaagtgattctcttgcctcagcctcccaagtagctgggattacaggtgcctgccaccacgcctggctaatttttgtatttttagtagagatggggtttcaccgcattggccaggctcgtcttgaactcctgacctcaggggatctgtctgcctcagcctcccaaagtgctgggattacagatgtgagccaccatgcctggccaggattttttttcaagagctctatattttgaccatttatctgtttctcttttctttttcctttattgggtgcttccagtctatcatattttgacatttgaaaagatcagtatttttccacacgctagtaagcatattttacttgaaataggtaggcccatgaaattttgattcctttttttgaagacaatgattttaacaagagaaaatggcttgctttatgtcttttctaataactgagttcaacgtgtatgataagtgagattctaacagttttggcaaaagtgcacaaatgtaactttcttgacagcattttgaatgttatccctccacagtagcttttatgtctgtccaacttgctttctaagacacttactttcatcggcactttcagatttttgaattatactttctcaatttgatttttcaagtgagttattaggatataggtgggagtggagaatgcctgcctgcctttcttcctttgtcattccctctctcctttctccctcctcccctccctccttttctccctctctccctccctccttccctccctctcttattcttttatttgtcttttttttttaaaggctttaatgttattctgcttctgttaagctggcaaatattgcccttaaataatcatcacagacactttcacccttcttaccctcaattcatcaaataaaaacaaattaattatggttagatgcatctactaaattgtgagtgcctttaggccaagagcagatgcttttcaaaatacgtagaagaatgaatttactcacagtacttgtgatcattaaatcccttagcctaccagtggcttttttacttgacttgtacactgggttaaaggctcttgctctccctgtctacttccataggttatcatatgacaataatgataataacaatacataacttttgttcagctcatgaaagtttttaaaatgttcccatatacaaagtgattaatgagaaagctctttagaaatacaaaaagcaaagcaaatgcaaggtattgttttcattagcaagtttaaagaaaacttctacactgaaatgtctgtgtggtgccattaagcatttaattttatttctcaggttatggatttgtctcatgagaggcgatgtgcttaagaacatcagtttgagtgaagcaggactggcataatgcataaatgtacttccagggaagtcgggaagacaccaaaaaatgtgcttactgttgccatagcttgaaatggaaaatgatcattttcctttgttagttctgaagagctagcagattgacagtaatacgaaacaggatctaattttacactgatgcaaattagataaaatataaaaattctggttctagaaagaacacaagtacttgcttataaattattcaattggacactttgaaaagagtctgcagtgctcctatttcggcaacatccaagtagatgttagaatgacggaatgtgttatttttgaaagtgactttatggatcatctaatcagttgatttgatggggaaactgaaacacataaaggcaaaatacttttgctatgaccatgtgactttttaatggctgaactagactctttcaatatatcatcccccatattttgcctataatatttcaaattctcactagatagagctcactgaaggtaggtacagcaggtcctctagtaatgcagttttgttcaatgttgtttcctcataacatcaatgaggggaaaaaaaaagttaattcctggctcaagccactgtctgggtgcaatttacgttctccttgtgtttgcgtgggttttctcccagtactccagtttcctcccacatcccaaagatatgctccttaagtgaattggcttctgtaagtggtcctagcctgaacgagctgtgtgtgtgtatgcgtgtgtgtgtgtgtgtgtgtgtgtgtgccctgcgatggaatggcagcctgtccagggctggttctcaccttgcaccctgagctgccaggatagactctggtcatctgtgtgcttgaagtggcataattaccttactatttttttttttttgagacggagtctcaatctagtccatactgatatttctttcctatatctctaaatgcttggactagtcattttgcaattcatgatggcccatactattcctttttttttttttttgagatggagtctcactctgtcgccaaggctggaatgcagtggcgtgatcctggctcactgaaacttctgtctcctaggttcaagcgattctcctgcctcagcctcccgagtagatgggattacaagtgccagccaccatgcccagctagtttttgtatttttagtagagatggggtttcaccatgttggtcaggctggtctcaaacacctgacatcatgatccacctgtctcggccttccaaagtgctgggattacaggcgtgagccaccacgccctgccccttacttgttttaattactttttctgaaatgtatgtatatatagttcacatttatttcaatgcttaatatgagaagtgttttgggctttatttagaaatttggtgatgttttggacactgtaggaacttcactcttgtttacatcaattagcctatggtaaaattggtttccttatctgggatttcgcttaaagttgcagtttccaagaacctattgatgacattaagtgaggacttactgtagtcatgaatccattaattcatccattcacccattcatccacccatcagtcaaaaatttgttgaacattaattttaagccacatatattaacattgtgcttttgtgttgttttgtttttgagatggagtttcgctcttgttgcccaggctggagtgcaatggcgtgttctcgactcactgcaacttctgcttcccaggttcaagcgattctcctgcttcagcctcctgagtagctgaaattacaggcatgcaccaccacactaggttaattttgtatttttagtggagatggggtttcaccatgttggccaggctggtctcgaactcctgacctcaggtgatccacccacctcggcctcccaaagtgttgggattacaggcgtgagccactgcgcccacccaacattgtattgttaagtgataaaagttcagggataaataagatgaggtggctgatctcaaggagcttatagtcttagtcactaagggacaataaaaaggagtgaattaattactctgcagagtaagtcagagaaatattttgaaaagagatatttgagttggaacatgaacacaaaggtcagttcctaactaacaaaataatcaagatgacaactttctactaagcttctgatattactaatatgaaatacaaataaattatttcagaggtagaagctttcactatagtatttactctatgtacccccctacacatttttaaactttaaacttcttggtccatgatgccattaactcatcccagccctgccttattaagatgaaagctttgacctaaaatatatatgtttcagaaaacctagaacaaaaagtaaaatgataatttattttcaaaccaaaccaacaaacagaactgtccttaaagcttctccttttagaagagtttcagttaataaataaatgtagaaggaattagagaaatacaaagttgccattagaacccaggagtaataatagttgcaggcaagatccaccagtgaatgataaaattattggtgaaagtttgagaaatgacagatatgtctatagtgataaagtgtttatttcaagatacttttaattacaaaagcaaaaatactaattttgtaatggagacaccaagcagattccaccttaacaaggtgatacatttaatatcaacagtaagaagacaggtgggcatcagcttttacctcacaggatatacttcaagcgtgcatcacttacaaggacattctgcaaaatgactaatctgttctctttaaaaatatcaagatcacgaaagacaaagaaagaggggggaactattatagactgaagataaataaggcaattaaaaaactaaatggaatatgagatactggattggatcatggaatagacaaaagccattagtggaaaaactggcaaaataccagtaaagacagtagtttagttaatagtattgtactatgacaattccttagtttttaagattgtactatgaatatgttctaggaatacatctcgcatgaaggtatggctctgcataccttaggggaaacaataggggagctggctgaaggatgaatggtacacagcaactctctactctttctgtagcttttttgtaagtttaaactattttcaaaataaaaatgatgtaaataattgtctttacacgttagggatacttctaactgatttgaacttttaataaagggtatataatgttgaaagctgatccaaatcattgtgttaaaggaaatttgaaacaaagggaaaaagatggttgtatttctgtaacatctttattctagtactaaagtatagaatttaaataaaatatatgatttagttatagattagtcttaactaatatcagaattagtcttaacctgtcttgtgccccacctctgtttacattaccctaaaaatagtatataacacaaaacagaaagcatgcgatttctcaagtatattcaggaggttgattctggggtgtaaaaaggtgtagggctatacggcccgtcattagcaaagaaaacaattttcttttaatttagaaaacatttttttatgcccaggagatattattggctcaagattactggcatcatagtgttgactttttcattatgaactttctaatagctaatatttttattactccaattatgtctttctcagtttcttctttatggctgagaagattattttagtcagcttgtgactttgattgggggattttctaagctaaagtgtaagagttcttaggtaattctatttcagtgtttagaatgctagatgtctatactttaaatcatgtaaatgtttatatgtttgacctcaactgatgtaagtgggttttattgagcattatttctaataataccatgtgtttgaaaatcccactattttaacataggtagattctgggtttaattactaaatttttttcaaattctgtgcaatcaaggtgaaagggtttgtttccaaggaaacaaatgcattccatttttatcacataaaatgttttctgcaagaaaattccataaccagtctccagggagataccgtgtcataaaatagctctcattggagatttttccaaaggaacactttattttatttttgttccctgaaaataatactgtatttgtgtaattttcattgtattgaatttttaaaaaattaacaacagagttgttgccatcgtctcattagagtcataaaatgtacaatttggggagaatgtgattttcctctgaccattaggttgcatttatatcggagtctaaatagcatgtattcaagatgttcacttgagaagaaacagcctgttctaatgatgatatttgtcaccttgaaggcttcattctttattggtatttatttgatgttggacataacttcttcttcttaagaaaatttgacagccacataatagtctggctttgcatatctattagtccattttcacactgctgataaagacatacccgagactgggtaatttataaagaaaaagaggtttaatggactcacagttccacatggctagggaggtctcacaatcatggcagaaggtgaaaggtacgtcttatgtggcagcaggcaagagtgaaaatgagagcaaagtgaaagggaaaaccccttataaaaccatcaaatctcatgagacttattcactaccatgagaacagtatgagggaaaccaccttcatgattcaattatttccgacttcctcccacaacacatgggaattatgggagctacaatcaagatgagatttggttggggacacagccgaaccatatcagcaaactattatgattgaattaagaaataaggaaactgagggaagtagatttgctttacacaaatctgagggattcttcttatgtacttctttttgtagtagttggccttgcccatgtgagtgtttgcatctagagacgttgtgttattcctcttgtagcttggacctaacatattaagtgctacaaaatgtttgacaatagaataaaataataaaacatttatacattaagaagacacatttttgaaatagaaaacaagataacagtgaaattacagtgggtggggatagcataatagtcaaaattagaagtcatagctctgccccttacgaagtctgtaacttagcatatcatttaaacctctctgtggccgggcgcggtggctcacgcctgtaatcccagcactttgggaggccgaggcgggcggatcacgaggtcaggagatcgagaccatcccggctaaaacggtgaaaccccgtctctactaaaaatacaaaaaaaaattagccgggcgtagtggcgggcgcctgtagtcccagctacttgggaggctgaggcaggagaatggcgtgaacccgggaggcggagcttgcagtgagccgagatcccgccactgcactccagcctgggcgacagagcgagactccgtctcaaaaaaaaaaaacaaaaaaacaaaaaaacaaaaaaacaaaaaaaaaacctctctgtaaaatggggaaagacatatctatttcataaggttgtatattaagataatatgtgtaaaaagtgtgtgtgctagaggaatttctttaaaatatgggaactattccataaaaagcactgtgatgctacacataatatgactttgtcttaattcaggagatgtattacatttttcttgtttttaatgcaaattccatgcatgggccagctaatgtgaaataatttaattaccttgctaggttaacactatcatctaaaaaacagaagttatttttaaaacattctgtgagagtttggacttctctcagcctaaccctaattctacaaatccccaaaattccaactgcagagatccaacatgcagctatctaactcatcccacatggctcaaatctttacatgacttagaagtatagattatcaatcaaagcaaatgggagaatggattgatttgtgaaatggcaacaggtccctcatgggagaccaagtggagcctccttaaaaagtttagcttgggcaatttgtgaacaaaagggagacactcatgactcatgacagacagtagcgtacaggaaacagtaaatactgacaacaaaatgtggcatttgtaaaacgttcattcatttattctttcattcattcattcatgtgacaattgtttatttagtggtgagtgccagggactaggctaaatgctgtccacatacatgatctcatttgaaatcacatgaaatttgggaaaatatgatcaatcccatgtagtggatgctgagggacacctcacagacccccacttaaggaccgaactacactcactctcccagctgtccccaaatgttggcagtcaaagcctcttatatgattctctatcaagatatgtgctctcaaccaaagatagacacctcacccagaatcatggtccttcctgggggcagcctgcatcccatgactgatttatgtaggctataccctatactcaattttgaactatactcaattttgaacatcgctgaagggttatcccagctccagatcctcggtaggctcacctgaggcccctgttgcaacagaatcacagatcatctccctctgtcaaatcctgtttttctcacttcttatgggtgtgttgttcctaaaaccactagccaaataaatctgtagcacacaaatcttaaagattcagattctatttcttggaaattcattttacaagtgaagaatctgaagttttattatttcacccaagcccatgtaggcaatatgtggtgggattaggatgctgtctccaaatgtcatgcatgttgtaaaagcccagcaattagaaatggggttcaaggttggaaatggcccttataaggttaggcctttaccaggtttaatttttcaatttcaggttggcagtccaaagtctcaaaattagtcaaaagtgttgtgcaaaggtaaaaaacatataaaggtagagtggatatgtccaagtgtccccattagcaggaagagggtaagagctaatgagcaaatgaagcttggtggaagtattgacaactagaagaagattttcacaccatttttttatatgggggctttgctaataagtcaattccactaagcagctacttatttgaccttattatttccaatatgtaataaaaattggaagatcaaaataaagaactataaacaacataaaatatttatgagaaatcatgtttaaagaacgtattaatgacattgaaaacaggtcctgaatctagaatggctgtacataagagagaaaatgagtacttatattaaaaatatgtatatgttggctatgaaaatggcaaaatcagataatgctaatattaactttcaatattttcaatattttctgaatgccagatatatatatatatatatatatatatatatatatatatatatatatatatattactaaccagggaaaggatgatgatttaacattttgaactcttttagtaataacacattaattcaatcaacaatatttattgcgaacctactatgtaccagacagtgttctaagcaatgggaatagaacaatgaatgagaaacatggtccctgtcacaagaccgtatatcataccagaggtagggagacagtcaacaagcaaacacatatggaaacaaggcctctctgtcagctgacctctaagcagtgaggtttcaaccacttcaggatctgtgagaagagccttctaggcaaaagaccaatgtagaaccctatgagggaataggaagaactttggaaaacagaaagaaaagcagtatggctgaagcagagcaagtgatggggaaggtatagatgaggctttagggttaggtaagagcccatcacttgtgggctaggaaagagaatttggattttattctaggtgtgatgataagtttttagtgtgttctgaacaatagaatgacatgatcctttttttataagatcattctgactttagagtgtccctgaaaaactgagtatattcaatgaacattcaggcattacttattgaactgaagaggagatagttggagagcactacagtatagctgggagaacataagctttgtagtctgatagatctacttcaaaatccatctctgtttctttctaactggaagttatcttctgaattttaggtttcttttttatttgtaaaataggataataaaacttagtttgcagggctatttttaggattggcgactcatgttcagtggctgacacagtgttcgtgctccgtattttgtgatggcaatgaatgtggagtacaggaacataatataaattatactgacttttctctgatctcatttgttgttggtgctataaaggcctgcagataaactctgacccttcttaaagagacaaataattgttttattggccttttagtttcaaaggaagttagacatgaaggcctgctgagactgcgtgactggattatttctttcgtattatttctccctcttttttccccattgtcttgaaattgtgtacctcagacctactgtttttgttgtctccagatcacacagagcaacttttgatggaaacttgggctcaccagcatacatttttgcagtgtgtgcatttgcacttaacaattctcttcttggctttagcaatgattcaagaaaaagaccccagagaagaccaaggtcatccaacttgtttaacaggctttttaggactaggggactcagatagagctcagcagtggcatatcttagaaaatgttatgtttggaaattcttttcttctgaggtggcagtgagatgcaagagttgatataccagggctacttgctttgagggcatgcatcaaggacaaggaaccccagcaatctcctccaatgctgcatttttaggattttgtttaaagtgaaaaaaataggaggaagaggaggaaattgggagataaggactcagatacagaagcaggaaggttgcctctgtttttttcagtgagtgattctctttgtacagtgctattcacattttcccacaatataatggttcacaaaatttgtaaggtccaggtgatcctctcaacttcccatatattagagacagctttgggtatcaccatcaaacaagtatctgaagaaatctcaatgaatgttattattattattgcttatttatgaatctcatttcacaaacttgggaataaagtaaatattactgtctttactttcactaatgtatcctaatttctgtctccgagtcctattttgcttacctagtagaaaacttaagcttaggtctttctggcattctcaacctcaagagtgaatcacaattccttgggcttactgcaaagtatgaatataggacaaccttgtcttgagtcattgagcctacaggctgacttgaccataagaagtctgttgtttctatcctcatagcttctttaggtttactataacagcatgtgttacctccttgtaatccttggggcccaggaatcttaagcaagtcttcctttgatcctctctgcctagaagccatctccttcctggtgtcttgctaccttctcaatatactttggggaagcagagcccaggccctttgtactcttaggccccaaacctggaaggtggggagtaggagggagttggtagctggagttgggctttcactctctatatgtcccttttatctactgtcctaaaagctttctgactttccctatttctcccctgggagacaagtgagctcagggcctgcctcttgcttcagtggaagagaagggaataggaaaaaggcagagagagaaatgcataggttgctatctcaaaactatatacacaaaactggaaaaaaaaaaaagacttctaaggctgcccttaaagagtggaatcttttctaagatgagatagagattacagatgaatatgttgaaaccaaaagaacagttttcttgttgtgccagaaccatgctggcttcctagggaaaacatactctgattcagccagagaaacaattgtgtcttaggcagatagttacaaagctggcaccatggagttgctttgaataaaccaatgcaattatgtggtcatttaaaaacttctctattttataattgaatgcactaagatagaagtggtacctagaagagcagaactctcaaaggtaccacgaccttttaccacatctctcctgagcctctcttttatttttacagtatttgattcttctctttttgatatttcagggctggaggaaactcctactcatgttatcagacactgtatgccttattttacatatgtgcttagactcagcgtccaaagggtaccattgtggcttgttgggctgaacatgggtccttgacttgggaagcataggtacacgttccttgctacacttaattcatttggtggtctttaacaggttgcttatgctatctaaggctatttccttattttaaagagagaagtgaaaaatatctaatgcacgattttgttctgagagtcaaatgaaacaatgtgatgagaggttgtttgtaaaatactgttttatacaattatttccttttctccaaaactgtttattacatgtgtgccatgtgccaaatactttgtttggtctaggctttagagccgtgtagataaataaaatgtagtcacttctgtcaagcaatataatctggtgagggagataaaacagaaagatacagcgtgaagtcatatctgtagggatagaactatgtcatatcatgcataattacatagtcgtacaaaaggataatactagaattggcttcctgaagaagttgattcctgggttgagtcttataggatgaagaatttggtggtatgaggtagatgaatgagaaagacatgccaaggtatcaataacagaatgaacagacagtgaagcagcaagcacccatgtgttggtgtgtattggtggaagcagagggtggacagacatatcaatatagctggcacttacagttggaagcaatatgtagcttgagataaatataggcaggtagttaaagaacaaagattactttgatgaagaactcagatgtaattttttaggtgatgagaaatcattgaagagttttataccatcagatttttactttttatagataaccctaatgaagggattcgcagtgtcagcagttaatttgagttatcaggactagaatcagagagacaagtcagtctcgccatcaggggaagcaatgatgaagatctgaattagcacactggcaataagaatagagtgtgaagaatagggcaatgcttggagattgacttggctcttggagataatgattgaaatatggaaatcaaggatgattgatgccaatgactgggaacacatatagagatagaaacaagtttaggagtggataaatttagtttggggtgctcaatttgagggctatgtgaggcattcagtttgagatacacattcagatgctggaattatgaacatgaacctcagagaagagatctgggccaataatatagatgtattcatatacttaataagtacagcttgagagactgcaaccatagaagtctcgtggtcaatttttgctctccaatactctcattttgataattaaaatatctggtttcatatggtagttaaatttcaagtttgcattttaagctaaagaatctgccctcccaaactttggacatgaaaaagatggaatgagggaggaaaaattgggccatgaaaggtctctcttgactaataccaatgtaatctggtattgggttgatctggttgtttcagatgtttcaaggtgattctttctcttgtgggtactttcatgggctcattgaagaattgcctactgaactatgctaattatagctcccttgatgtcagcagtgtgtatccttaggctggctacttacagccccttcccatccctcccactcaccatgcagttccactttttaatggtccactagtaccaccctaatctaagatatcctttctactttaagttctgctcaggtgctatagcatttatcctgaaacatggactagttgatatttgttcttccagggcttcaaccaaaaccaaagtagaatgaaccccatttttatcttctatttcagagatatgtgaattgttcaattagaagtggtaattgaaatgatgagatcctttttcttcccaccttcaccctcgcagtaagaatgctcacaaaggggcagggcacagtggctcatgcctgtaatcccagtactttgtactttgggaggccaaggcgggcagatctcctgaggtcaggagtttgagatcagcctggccaacatgatgaaaccccatctctactaaaaatacaaaaattagatgggcgtggtggcaggtgcctgtaatcccagctactcggtaggctggggttgaacccaggaggcagaggttgcagtgagccaagattgcacaactgcaatccagtctgaacgacagagcaagactccctctcaaaaaaaaaaaaaaaaaaaaaaagaatgttcaaaaaggaagataactggaatgcaaaatacaaacagattgctgggagacaaaccatcattcagaaagtgagctaaggcagggaaggacagagacagagaagcaatggttgagatagaaggagaacctggagagtaaggagtcaaataaattacagagtaaagaggtctaagaaggaggacatagtcaatatatgggatgttgtgaagagatgcaatattatgaggactaggataggaaaatattagattttgctatgagatcaattgctatccttgcaaggaaatccagttagagaaagggaaatggcaagggtttttgagaagtgtggatgaaagaggagaaatattagatattagatacaggagatgtggggtcaatatagagtttttagaattggagaagccagcaatgttcacaggctgagggaaaacaggcatagtgagggcttatttgaagagccaggaaggaagaaggataattgatggtagatggttaaagctgattatttctcttttgggcacttttgatgtctcgtggggtgtaggaaggaaggagatcaagagcatagtgaagaggctaggactgattagaaggaggggtagctcatccgctgaaaaaggagaagtgtgacataagcatgcattttgatttgtttgttcatagtggcagaaagctgaatgagatcatgtctgatggctttaattttctcactgaaataggggataaggctctgtgctaagtgtggtgaaccaggatctgagtcacttctaatccactcatttagaaattataaagactgaactgaatggagtggtattattatacctaacatacagatctggaatctgtgattcagaacacttaagtggcttgcttgaggctaccctagtggctaatgttagagtctggacagaatgaagagtccccagatcatcaggttattggcacttgacagtctcaagaaattcttatgttccatctttatcggcccatcaaagaataagaggtaaaaatagaaaattgcaaaaggagttgtaaatttatatattctttatcacctttcccctctcctttttataaccaaactttaacatttactgaatatctaatatcttctagtcactgtgataaacgctattctgggaaatcaaatatgtagctgatttatagtgagcacttattatgtatcaggaactattctaagtattttatgcttataaatgaatgtaattattttatgaatgtaatgaggctggagaactcttgtctccatattatagagaaagaaactgaagtccagtgatgttagctgacttaaacacagatattaaatgacaaagctaggcttgtctagctacagttcccacagtttaaatcattacaatatacgtagtttctactctcaaggaacttaccttcttttgggaaagcaaaaggaaaacatggttggttttaacaaataaagcaatcaaaagccagatgatataacactacagaaaaagtaatggcctggcactgtgggtcacgcctgtaatcccaacactttgggaggccaaggtggttggatcacctgagatcaggagttcgagatgagcctggccaacatggtgaaatcccgtctctactaaaaatacaaaaatttgctgggcatggtggcgggcacctgtaatcccagctacttgggaggctgaggcaggagaatggcttaaaccctggaggcggaggttgcagtgagccgagatcatgccactatactccagcctgggcaaccaagcaaggtcgagcaagactccatatctacagattcaaaagaaaagtaataatatgggccatcatgaattgcaaaatgactaggcatttagagatacaggaaagagatgtcagacggactagattgtctgacaggtaggattaatacattttgttaatacaacactaatggctaacaggtgtttgttgaatttagttgatcaaagagaaatagtccagtcagccttatcatttatgtgcacatatataaaactttagacctttatattaaacccaaatcaccaagctggactttgccttctttcaagtgttttcccttagaacttttattgccagcaaacctaagctataacctttccagccactgggataggttctactaacactgaactccaaaaacacctctccaagtgggagagggccttgatctttttccttttagctaaggaagctctttgaccaccataaaaatttgctggttttctccctactttatcaacatatcaaaggtatactgagaaaggcagcttatattgggacccaaaaggtctaattataacctctgtatttgttttctattgttgatgttacaaattaccacaaattaagtggcttagaataccaaccacttattgtctcatggttctattcatcagaagtccaagtacagcatggttcaactgcttgaaatctccaagccaaaatcaatgtgtcagcatgtctgccttcctttctggaggttctaaggatgaagttgctttaagttcatgaagattgttggcacaattcagttccttgtgcctgtagggctgaggtccctgttttcttgccgaaaaccaaccaggaaactctcttagctccttaatactggccagtttcctcatcccattgttccctccatcttcaagccagcaaaggcacgcccttctaatgcttcaaatctcctgggctttccacatcgctctccctccagtaggagaatgttctctactttaagagctcatgggattagattgggcccatcaggatattccaatatcgtcttcctatcataaggtctgtaaccttaatggtatctgcaaagtctcttttatcatttaatgtaacatatctatgaattctaagggattaggggatcagcatcttctgagatccttctgcccactctaccatccccctagaaacaagggagcattactcagaatagccacttaaataattccccctcccccctcaaaaaaaaaaaaaaaaaaaaaaacaacaaccaatgggccaaacatacaaaaaccacatctgcaccagagccaggtatctgctgactctccagctctagtcagagaagaggtgaacatgttttgaaaggaaatatttttcatcaggcatcccattgtatatgttggacgttagaccattctttacctatatgaggtacttagtaaatagtagctgctgtgatggtgatgaaggcagtgatcccactagactcaacttaagacagaatgctagctactgaagcagattcaaagcaatcaaacttagcttttgccttagggaaaatgacaggtacacaaacacaggatggagcagtaaacgccttgaaaagagggacctttttttttccttttgatggctgttcttgatgcttgttttaaactgttatcacccaattaaaaatgatgcaaagggtggaaagcagggtttgttaacacgggatttaccccaactgccactcacttcctgtgtagtgccaatcttgcaaatccagaaaggccagccactcgaaaccgcctcagagagggccaggaaccaggaaaggtcagcaaagcctcttggatttaaagtaaagaaccaggaaacaaagggctcaacgcaacttttacaactacaaattaaatgcaaaaaatgacacatcattacataagcagcataaaatataatttaaatgtcaaaagaactgaagattcttgaatcatgtaagaaaaacttgcagaatgtgttaaatgtctcaatttgtactataccaaaaaaaagtaaaaagtaaaaatggcattgttttataatgcaaaaatacagaaatcagtcttgttttcctgctgtttatagaaatccttaggcttattttagccaactttaaaaatattcatcttttaaaaattctcatgactttcagggactgtggatatatttgaggataagagggtattatttaacttaagacagtgcttaaatgtgatatgtgtgcctattaaagttacagttaaatcttttatatggatgcattttcattgggaggagtaggcgtttcacagattgctctactacttggaatatgatttcacatacatttttgctctcttgaaaattagctttgtggcaattggtttccctacttctgccacccacttacattttagatctttgttttgaagcttgtgagatatatttaacaacatcatattaacattttaggtctctgtctgaatacagtagttccacattctttggcagatgcagaatttttctagtttttggttgtcaaagatatcaatgtaaacaaagctaaatgtgtgtgtatgtctatacatgcatttgtatgtgtatgtgtgtagtataagctatacctagaaaatttactcttcaatcatttattaaacatttattgagctcttactgtgctccctgccattacctaagcactgagaatactaaggttactaggacacagtaccctggattcagagagctctcagaatattggttgagggaaacttggagcagtatattgtggtaaatggcagccagcagtgcagatagaaagctttgagaatatatatatatatatatatatatatatatatatatatatatatgaagaaacttactttaaactagggcagaaagaattgagcaaagtttcccgaagatgactttattttagtgaataagtcttatagaagtaatttgtttattcaggtttctaatacttttggcattttctcagattggatgaattcctccagtttagtggaggggacatatgaaggaaaggagagtgagttagggaagaagagagagtgaggagtagtctcagaaagcctcctcagaaagcctcagaaagttatagcctcctgggctcttgcctctgggaagagtatacatacaatacttgccgggcctatgaaaggctggacctgaagggcatcttaggtcagtttcctttatgacaacattttcctggacagtcttcagtagtgctacctgaagtcacataggcttccctcccaggtcggtcattcttcaaactagggcaccaacacaatgtattctgcacctgaggtatcatgaaaacagcaagggagtagaaacatagttgactcttgaacaacataggcattaggggtgctgaaccctcgcacagttccaaatcgaatattacttttattccccccaccaaacttaactactaatagcctactgttgctcagaagcctcgcaggtaacatactcaattaacacatatttgtatatgtattatagactgtattcttacaataaactagattaaagaaaatgttattaagaaaatcacaaggaagaaaaaatatacttattatttattaagtggaaaagggtcatcataaaggtcttcatccttgttatcttcatgttgagcaggttgaggaggaagaggaagggggtggtcttgctgtctcaggggtggcagaggcagaagaaaatttgggataagtggacctgtatgctttaaacctgtatcgttcatgggtcaactttaattctacataacctctaagaaagtcaacagtagtgctaaaagatttaaagtcacttctgccagtttacatgttgctttgcttggctcacttcaaaattaggaaacctataatcctttgccaagaattcagtatgcaaatattttctaataaagaaaatcataggaggaagttgaattttgttgcagtatgccaacacactaacagtggtttttttttaaatttttttgacagaatgcagtgttagaaagcaagcataatagagttcatttacaagaacacctgctttaaaaataaccctactgttaggaggaaacaacttctggactagttcttttgaatggaaaaatccagaaacgaacaggaaataaagttgttgtgtgttacatacagagcatttgcatcatgggaaaagctttatattccttttgaagtgccacaattatgttctcatttaataatattgtaatgtcggtgctttgatcttttgttatctgtccacatttggtaattttgtgtcttacagccttcagttcagaaaaaaagttagtcagaaagaacagttgaaggtttccttcaatactcagttcagctaccagaaaaggtctccacagaagatttctctcccagcatcagagaatgggtgggtaatatagagtaagctaagggagagagaacagttcagctcgcatctgtgcttcgcatctgtgttgtaacaggcatttataaaaggctgtagatgcagtacgaagaccatagcacaggagccacacagctgattagagtaagaagcccagaaaatgctggaagaatcagaagagcatcagtttagttcaaaagatgcttatgaaggacttctcttttgctagacactgaactgcagtaaaagtgaagacaagggtttgtctttgtttctagtgagagaaacaggttcattcacaactaactgtattatgagccatttatacaccaaaatgcagaattcattttagccaggggaagtaaggatgattcattgagtagataatgtttaagtggagacttgacaatagggacaatatttgcaggtagaaaatggaaacgtgggaatggtaggtggatcaggcgttacatctggaatccactgcaacaatctgagcacggttgaagtaaggagtaatgcagagagatgagactaataggactttggttaattggaacaggacagtgaagtcagaagatccttgatgctgtgccagccagggtgcttctagggtgggaggtgatgccatatagtggaatagcagacactgctgggcatacctccttatgaacaggactctaattctaatttgaaagccaatgtgcttaacataaaatcaccattttctcagaactaccttgtagcaagggatggctatgtaacatagtttaggccattgagacataagcagaagttgaaatataagcagaggacattctgaaagcctcttgaaaaggagaaagacacagctgacatctgcctttttcatgttgccctgcacccttctttctactcaatttgtaggaatgggcagccatcttgtaaccacgatgacagatgtcttgtgggcagatgtcttgtgctaaggatcctagagcaggaagaaataaagagcttggttgagtatctgcaataactcaggtctgcctaccccagactccttgttatgggagaaaaataaacttcttatttgcttaaaccactgtaaccaggtttctgctagagcagctaaattgaatccttactgatatagttggcctgtggggaaaagtgaaaatagttgagcagaaaagttgaatggaagttacaagccctaagaattgcaaggagggagaaaggaaaactttccagattttcccaagtcagtaccgtgcaaacggttccaggtttttttccattgaagaactgcacgttattacatccatccattcaacaattaaacaaatatttatttatttattgtgccactgttatgtgtcagacattttactggatgccagggatacaaaaaggtatatgatgagacccttcaggaagcacatgatctaatagaaacaagcgcgtcaaagttaatcataaatagtttggatttgaaaactgtgatttataaatttataaaaattcctgaaactctagtagagaataaattattttcttccagctgcaccaaagatttggaatgtaaattggttactgatacaaattgagcatccctaatgtgaatatccgaaatgatccaaagttagaaactttaagcattaacatgacactcaaagggaatgctcactggagaatttagacttagattttcagattaaggaggctcaatcattcaacaggtaagtataatgcaattattccaaaaatctgagctccaaaagacttctggtcccaaacatttttggaggataagggatattcaacctgtacattagtgctgcggaataaaagaggccatggtactttttcaccagtgactttgagttaaaggagcacaaaattagtgtctttctaaaggaaaatgaattgagtaactggagaggtattctcttgggagacacatacataccaccagtggacagttatggatggctagtctactttcatacacttccaaaagttcccatctccacttttaaaaaccactgcatcccatcaaaattctaactttttacaatagtagaatggactgatgtgtgaaatagaatctctttatgccttgatgaacctatggtggccgtgagtagcaatctacaaacttgactgctagcttctaaaacaaacatttaatatcagcattaacctattcctttccagacattcatcaaacattattgatcaccccctatatgacagacaccatggaaggtgatgagaaaacaaagtagggtggcatggtgcttgcccttaattttctgggaggctgtgtatcactgcaaaaggaaataggcaaggagcaggctctccagtgcaggcacctaagggaactgcagaaaatacatggatggttaattagtaggaagccaagcagatttgatagtattagagtccaagagaaccttgtagatagtataactagcaatgctggagagcgttgcaacagtgggcaaggctactatttctctgccctgatatttggactttacaaataggtggataaaagttcccaggtatataactgacccttaggtgctatgggctcttatgggctccaaaagccaaaacataggccttttctggggataagggcaccccatcatttatctttgtatgatgaatgcagttatgttttgaagtcttgagtctcagggaactttggaggtcaagtcatttctgagctttttattgaagtagcaatcctgtggtcttcagatgatgggaagtgatttccgcaaaagcttttatgccttaattgcttgtcctttaagaaatgtggtatgagataaaacaaagaaggtgcctttccagccagttcattacagctttgcttcccacagtgcattgttgtgcttctctggataaatactaagtagtgtttttctcctaattatttcctcaaagtgatagtatcagccctgatgttgaataatgatctctgctattattaagattttgtgtgtgtctgtgtgttttgagaattgtgtgactgctatatgactgcaatatttgcttcgcttcacaaaagtcagtcaggacaggaaggcatttgacaggttaactagtccacccctcacttctggaagtaacctttaacatctgctgttagatattcttcttcttttctgttcacagcctaatagaaatatatcaacactactcatcctgaacaagtttaggagaaggccattgcctgggtagcatgctttttttttttttttttttttttttttgagacggagtctcactctgtcccccaaactggagtgcagtggcgcaatctctgctcactgcaagctccgcctcccaggttcacgccattctcctgcctcagcctcccgagtagctgggactacaggcgccggccaccatgcctggctatttttttgtgtttttagtggagatggggtttcacagtgttagccaggatggtctcaaatctcctgaccttgtgatctgcccatctcggcctcccaaagtgctgggattacaggcgtgagccaccgtgcctggcctgggcagtgtgattttatggacttagtctaccatgactttttcccttggatgagcagctaaacagttaccactgttgcacaactccactgttcaaatcagaatctatgtgaatggtggtcctgaagttgtgcaataaaaaatgcacagagtcagacctcacaactctgagctaagatatagatatttgaaatgtgtccaccacatttcaagcatcacactgtttgggagcctgcttgctattctgaagactcaaagttaaatattaaaatttcatgtaaattttgcttctattctattatttgtttaagacacaaatcctattttaaactacgtaccatagaggaaaattagtgttccattaaaagtgaccatgtttaaaaatctgtactttcttgttcctattgcacactaaaaatgatgggtaaacacaaaggacaaaggacagcttctctaatgagctgtatgcaactctagggcctggaaattcaacccattttgaatttgtggatctatgctctcaagggtttatatatgactacattaataaatcagccaatagacttcaaataggttgacagcatgtgaaatccaagtgaaaaattttgtgcagtgaggagcaattcatgtggaagaaaagcaaaaataacatatttgatcaatatattatacttcagaaagcacttgcacatgagactgtgacctttgtcagtcaaagaccattttcaaattatttgtgttcccattgctataagcaaaagtaaattcctaataaatatttcctaagttaattcttaataaatattcgttatcatatttggcccacctaacagccccgtaaggtcaggaatactatcattttgcaaaggatgaaactgaggttcaatattgacttgcccaagataacactgttagctgatggcaggattgggaaagggaacctgaaccatgtcccgtgattcatcaacagtgcactgtctatgacaccagctaccttccacatgcccacactcacagtttcctcttaataaacacacaatttcaggggagaggaaaaacagtccatgcattttgagttgctttttctggttcaaatgcctggtgcagagtaaaagctattttctaaatctggtaaatcttcttgtctgcttggattcagtcagacttcagaatggaatgagcaaattatagatggcagtaatagggtgcttccagtggggcgtttcttagccactttattctgcttcttggagctccacttggagatgttttaaatcactcaggaagagaaactagagtgagaaagccagacttgtaaggagctctgtcctaacaggtgtctttaatgatttgctattactttatcacttgaggcactaattatttggaacgtacccaagtaaaccctaccaagtcttgcaaaaagacaatagaaatgaggaaaacatgttttctcttctttggggcatcactatttcatctgtatcattaaaagaatacattcttgggccaggcatggtggcttatgcctgtaatcccagcacttagggaggtggagatagatggattcttgaggtcaggagtttgagaccagcctggccaacatggcaaaaccctgtgtgtactaaaaatacaaaacttagccgagcttggtggtgagtacctgtaatttcagctactcgggaggctgaggcacaagaattgcttgaacctgagaggcagtggttgcagtgagcccagattgcaccactgcacttcagcttgtgtgatagagtgagacgctgtctttaaaataataataataataataaaataaataaaataatacattcttaggaacataagaatttgcactagcttccccaaggaattttctatgatctgctcacttgttatctaaatcctgtctattcttgaaggatgctgaaagctttctatgccgattctatttcacacaataatgtccatgtcttactttctatagtttgttgttttttaaacatctttattgatttataatttgcaaagcataaaatttatctttgtaatgtttacaatttaattatttttagtatatttatggaatcgtgcaatcatcaaccacatttaagtttaaaatttttgggtatctcccctaagaaaccctttattaacattcactctccatgagcattcactctctactaccaccatccttagccctaggcaacactaatctattttctgtctctacagatttgcctattctggatatttcaaaaaaatgaaatcttacagtatgtgatcttttgtgattgacttctttcatttagcataatgtttttagggtttattcatgtagcatgtacctgtactttattcctttttattgttggataatattccattgtatggctacaccatattttgtttatccactcatcagttgatgaacatttgggttctttctagtttttgactatcatgaacaatgctgttatgagcatccatgcacaagtttttgtatataactaggagagaaatcgctaggtcatatggtaactatgtttaaccttttgaagaattgccaaattttcccaaagaaggtgtaccgtttttcaatcccttcagcaatgaatgagcattctgatatctccacatccttgccaatgctttttactgtttgcctttgttattttagctaccctagtgagtgttagtggtatacaattgtggttttaatatgcattgctcttgaatgatgatggtgagtatcttttcatgtgctaatggccatctgtttatattttttttgagaaacatctatctaaatccccatttaaattattatatttttaaactattgagttatttatatattctggacacaagtatgtctgattattgattatataatttgcaaatattttctcctattctatggattgtctttttactcccttgatattatcatttgtagcacattaattttgatgtggtcaaatttgcatttttttcttttgtcacttgtgctgttggtgtcccttctaagaaaccattacctaacaaaaggttatgagaatttactcctgtgttttcttctgcaacttaaggtttgggggtgctggggtgctagtaatcccagaactttgggaagccaagatgggaggatagcttgaaggcaggaatttgagatcagcctgggcaacatagtgagacctatctctccaaaaaagtgaaaaattatccaggtgtggtggcacatgcctgtagtcttagctactcagtaggcggaggcaggagcatcccttgatcccaggagtttgaggatgcagtaagctatgattatgccactgcactccagtctgggtgacacagcaataccctgtctcaaaaaatatataaaataagataaataaaatgaaaaataaagtttggactctgataaattttgaaataattttttaatatgttgtaaggtaggagtccaactgcattctttgttatgtgggtagccagttatctcctcaccatttgttgaaaagactgttctttccccattaaattgttgtggaacccttgtagaaaattaattggccatacatgtgtgagtttatatctggactctcaattcccattccattgatctctatgtatatccttatgctagtatcacactgtcttataactaagactttgaaatcaggaatagtaaatcctacaactttgttctttttcaagatggtgttggctatttaggggcctttgtaaccccataagaattctggaatcagcttttcaatttctgaaagaaaaaaaaagggccagtggaattgtgtcaggcattgcactggctctgaagatcgttttcacattattcattgctaacatatggaaatacaattgatttttatatgttgatcttttgtcctgcaaccttactgaagtcatttattagcactaatatttttctatcagattccttaggattttctatttacaagattatgacatctccaaatataaattgttttacctcttcctttccaacgataatgccttttatttctttttcttgcctaattgtactgactagaatcttcaatataatgttgaaaagatgtggcaagagcagacagcctcgttttgtccctcattataggggaaagcacccagtctttcactgttaaatatgatagtggctgtgggtttttcatagatgtctttcatcggattgcagaaattccattatatccctactttgttaggtattttttcatgaaaggatgtggaatttgttatatgcttttactctgtctattgaaataatcatgtggcttttattctttaatttgtaattatggtctattacattaattaactttcgtatgttaaaccaaccttggattcctgggttaaatcccacttgaccatggtgtctaatgcttttatatgctgctgtatccaattcgctagaattttgttgaggaatttttatatcaatattcatactggatgttagcctgtatttttctttccttgtgatgtcttcacctgattttactatcaaagtagtactgacctcagataatgagttggaaagtgtttcctcttcttttatttgttgaaaaaatagattttataaggatttgcgttacttctttaaatgttggatataattcaccagtaaagccatgtgggtttgaacttttcattgttgggtgtttcgtggaacaaaggacttacaggcaaagagaacagtaaaatgtaatagaacttttttaaggagcaattagaaagcaaaagcagctgaagctgaagtgactccccattgcctacatgttaaaatttaatctcattagtctggttaatggctcttcctaatgtggaacttgctgaacccctccagcttcattcatctcctgtcactatttctctcacactttaagcatcttccatgctgaactcatgataataatagttactctcttccaggcattgtgttaagtctgacaaaatctcaatcaaccattatattcaaattcccagaaataaggctgctcttatttcatgactttgttcatgaagctcttactccccagaatgaactatgcctttattcgtttcttctccctgtctgcctctgtcttgtgaggctgaaaaattcctatctgtggtttaaaactcaccttgagtgtcacctaaataaaacaccagtgaagaatgtctaacaatctgggtactttttgttaatctgtctgtttctcacctattgtaagtcttttgatggcaggcaccatatttgattcatctctttatttccgatcttccagagtgcctgtcacatagtagacactcaataaataattgttgagctaatgaataaacctggctatccagaatgaggctctccccagcattttggagagctgagatgttattgtacttctctatgtttcttatagcacctagtgcaacactgagaaacactcattgaagttaactcgactgaatgataaattaatattataatgtcagtagcacattttgaactcttcagtaaaaagacaccataaaaacctcaaagtagctgtaaaaaatagaaatgataaaaatctgtttagatgacatcttttaagaaaatacaaaaacaattctgttatgttttgatacataattacacttgaagatttttggtgtaacagagctgtgtttgagaattctagtgatcataataacagcactgcttgatgctaggggagggtaaatccattttagaagcttttcaatgacaagctttgttctctgtatctggaagcaattcccagtgctgtttacttaaatgctttataatatggaaaactcaggagcattgtaggatccccaaagacaggagaagatttaatgtttcttaaattctccctctgtcacaagatgaagatgagcaggcagggtggcagcactggctgtggcagcagcagcacaccaccacctatgcaaggtctgtactttttaacacagcattggaagccagtatcagtcatggttctccagagaaacagaactgatgaggtatgtatatgtacatatatataaaatatatatatgattaagtgtgtgcatatatatgtgtgnnnnnnnnnnnnnnnnnnnnnnnnnnnnnnnnnnnnnnnnnnnnnnnnnnnnnnnnnnnnnnnnnnnnnnnnnnnnnnnnnnnnnnnnnnnnnnnnnnnnttgactgtattcgaattcgagctcggtaccctgcacaacgtgcatgtttgttgcatatgtatacatgtgccatgttggtgtgctgcacccattaactcgtcatttaacattaggtatatctcctaatgctatccctcccccctcctcccaccccacaacaggccctggtgtgtgatgttccccttcctgtgtccatgtgttctcattgttcaattcccacctataagtgagaacatgcagtgtttggtttttttgtccttgcgatagtttgctgagaatgatggtttccagcttcatccatgtccctacaaaggacatgaactcatcgttttttatggctacgtagtattacatggtgtatatatgcctcattttcttaatccagtctatcattgttggacatttgggttggatccaaatctttgctattgtgaatagtgccgcaataaacatacgtgtgcatgtgtctttatagcagcatgatttataacccttcgggtatatacccagtaatgggattgctgggtcaaacggtatttctagttctagatccctgaggaattgccacattgacttccacaatggttgaactagtttacagtcccaccaacagtgtaaaagtgttcctatttctccacatcctctccagcacctgttgtttcctgactttttaatgattgccattctaactggtgtgagatggtatctcattgtggttttgatttgcatttctctgatggccagtgatgatgagcattttttcatgtgttttttggctgcataaatgtcttcttttgagaagtgtctgttatcttcttcccccactggttgatggagttgttttttcttgtaaatttgtttgagttcattgtagattctggatattagccctttgtcagatgagtagattgcaaaaattttctcccattctgtaggttgccttttcattctgatggtagtttcttttgctgtgcagaagctctttagtttaattagatcccatttgtcaattttggcttttgttgccattgcttttggtgttttagatatgaagtccttgcccatgcctatgtcttgaatggcattgcctaggttttcttctaggatttttatggttttaggtctaacatttaagtctttaacccatcttgaattaatttttgtataaggtgtaaggaagggatccagtttcagctttctacatatggctagccagttttcccagcaccatttattaaatagggaatcctttccccatttcttgtttttgtcatgtttgtcaaacatcagatagttttagatatgcggcattatttctgagggctctttctgttccattggtctatatctctgttttggtaccagcaccatgctgttttggttactgtagcctcattgtataatttgaagtcaggtagcgtgatgcctccagctttgttcttttggcttaggattcacttggtgatgcgggcccttttttggttccatatgaactttaaagtagttttttccaattcagtgaagaaagtcattggtaacttgatggagatagcatcgaatctataaatcaccttgggcagtatggccattttcacgatattgattcttcctacccatgagcatggaatgttcttccatttgtttgtatcatcttttatttcattgagcagtggtttgtagttctccttgaagaggtccttcacgtcccttataagttggattcctaggtattttattctctttgaagcaattgtgaatgggagttcagtcatgatttggctctgtttgtctgttattggtgtataagaatgcttgtgatttttgctcatcgattttgtatcctcagactttgctgaagttgcctatcagcttaaggagattttgggctgagaccatggggttttctagatatacaatcatctcatctgcaaacaaggacaatttgacttcctcttttcctaattgaataccctttatttccttctcctgcctaattgcccgggccagagcttccaacactatgttgaataggagtgatgagagagggcatccctgtcttgtgccagttttcaaagggaatccttccagtttgtgcccattcagtatgatattggctgtgggtttgtcatagatggctcttattattttgagatatgtcccatcaatacctaatttattgagagtttttagtatgaaggttgttgaattttgtcaaaggccttttctgcatctgttgagataatcatgtagttttggtcgttggttctgtttatatgctggattacgtttattgatttgcatatgttgaaccagccttgcatcccagggatgaagcccacttgatcatggtggataagctttttgatgtgctgctggattcggtttgccagtattttactgaggatttttgcatcaatgttcatcaaggatattggtctaaaattctcttttttggttgtgtctctgccaggctttggtatcaggatgatgctggccgcataaaatgcgttagggaggattccctctttttctgttgattggaatagtttcagaaggaatggtaccagttcctccttgtacctctggtagaatttggctgtgaatccatctggtcctggactctttttggttggtaagctattgattattgccacaatttcagaccctgttattggtctattcaaagatttaacttcttcctggtttagtcttgggagggcatatgtgtcgaagaatttatccatttcttctagattttctagtttatttgcgtagannnnnnnnnnnnnnnnnnnnnnnnnnnnnnnnnnnnnnnnnnnnnnnnnnnnnnnnnnnnnnnnnnnnnnnnnnnnnnnnnnnnnnnnnnnnnnnnnnnnttcattgatttttttgaagggttttctgtgtctctatttccttcagttctgctctgattttagttatttcttgccttctgctagcttttgaaagtgtttgctcttgcttttctagttcttttaattgtgatgttggggtgtcaattttagatctttcctgctttctcttgtgggcatttagtgctataaatttccctctacacactgctttgaatgtgtcccacanattctggtatgttgtgtctttgttctcgttggtttcaaagaacatctttatttctgccttcattttgttatgtacccagtagtcattcaggagcaggttgttcagtttccatgtagttgagtagttttgagtgagtttcttaatcctgagttctagtttgattgcactgtggtctgagagacagtttgttataatttctgttcttttacatttgttgaggagtgttttacttccaactatgtggtcaattttgcaataggtgtggtgtggtgctgaaaagaatgtatattctgttgatttggggtggagagttctgtagatagctattaggtccacttggtgcagagctgaattcaattcctgggtatccttgttaactttctgtctcgttgatctgtctaatgttgacagtggggtgttaaagtctcccattattattgtgtgggagtccaagtctctttgtaggtcacacaggacttgctttatgaatctgggtgctcctgtattgggtgcatatatatttaggatagttagctcttcttgttgaattgatccctttaccattatgtaatggccttctttgtctcttttgatctttgttggtttaaagtctgttttatcagagactaggattgcaacccctgccttttttgttttccatttgcttggtagatcttcctccatgcctttattttgagcctatgtgtgtctctgcacatgagatgggtttcctgaatacagcacactgattggtcttgactgtttatccaatttgccagtctgtgtcttttaattggagcatttagtccatttacatttaaggttagtattgttatgtgtgaatttgatcctgtcattatgatgttagctgggtattttgctcattagttgacgcagtttcttcctatcctcgatggactttacaatttggcatgtctttgcagtggctggtaccagtttttcctttctatgtttagtgcttccttcaggagctcttttagggcaagcctggtggtgacaaaatctctcagcatttgcttgtctgtaaagtatttcatttctccttcacttatgaagcttagtttggctggatatgaaattctgggttgaaaattcttttctttaagaatgttgaatattggcccccactctgtgctggcttgtagagtttctgccaagagatcagctgttagtctgatggcttccctttgtgggtaacccgacctttctctctggctgcccttaacattttttccttcatttcaactttggtgaatctgacaattatatgtcttggagttgctcttctcgaggagtatctttgtggcattctctgtatttcctgaagttgaatgttggcctaccttgctagattggggaagttctcctggataatatcctgcagagtgttttccaacttggttccattctccctgtcactttcaggtacaccaatcagacgtagatttggccttttcacatagtcccatatttcttggaggctttgtttgtttctttttattcttttttctctatacttctcttctcgcttcatttcattcatttgatcttccgtcattgataccctctcttccagttgatcgaataggctattgaggcttgtgcattcgtcacgtagttctcatgccatggttttcagctccctcaggtcctttaaggacttctctgcattggttattctagttggccattcatctaatttttttttcaaggtttttaacttcattgccatgagttcgaacttcctcctttagcttggagtagtttgattgtctgacgccttcttctctcaactcatcaaagtcattctccatccagctttgttccattgctggtgaggagctgcattcctttggaggaggagaggtgctctgctttttagagtttccagtttttctgctctgttttttccccatctttgtggttttatctacctttggtctttgatgatggtgatgaagaaatggggttttggtgtggatgtcctttctgtttgttagttttccttctaacagtcaggattctcagctgcacgtctgttggagtttactggaggtccactccagaccctgtttgcctgggtatcagcagtggaggctgcagaacagctgatattggtgaacagcaaatgttgctgcctgatcattcctctggaagttttgtctcagaggagtacctggccgtgtgagatgtcagtctgcctctactggggggtgcctcccagttaggctactcgggggtcaaggacccacttgaggaggcagtctgtccattctcagatctccagctgcgtgctgggagaaccactattctcttcaaagctgtcagacagggacattgaagtctgcagaggtttttgctgccttttgtttggctatgccctgcccccagaggtggagtctacagaggcaggcaggcctccttgagctgtggtgggctccacccagttcattcttcccagccactttgtttacctactcaagccttggcaatggcgggcacccctcccccagcctcgctgcctgcaaccttgcagtttgatctcagactgctgtgctagcaatgagtgaggctctgtgggcataagaaacctctgagcccagcgtgggatatatcttcctggtttgccattgctaagaccatnnnnnnnnnnnnnnnnnnnnnnnnnnnnnnnnnnnnnnnnnnnnnnnnnnnnnnnnnnnnnnnnnnnnnnnnnnnnnnnnnnnnnnnnnnnnnnnnnnnncacacacacacacacacacacacacacacacacactaagaagtttattgtaaggaaccagctcacatagttgtgggatctggcaagtccaaaatttgtagggcaagccaacagactagaaactcagtcgggagtcaatgttgtagtcttgagtctgaaattaataggttaggctagcagactggaaacttaagcagatgtcagtgctagagtcttgaggcagaatttcttcttctctgggaaatgtgtttttgctcttaaggtcttcagctgagcaggagaccccacatgcattattgagagtaatctccttaacataaagtcagctgattgtagatgttaaccacatctacaaaacatctttgcagcaacatacagattattgtttgattaaataagtgagtactatagcctagccaagttgatacatagaactaatcatcacaaggtcctttgacacatggaacatgcttccctctcccaccttgtattttccatgacttctcatgccccacaccagattgcaaagctgctctgaagaagccctgcagttctctgccttttggtgcctttgctgttttctccatccctactctagattctctctcctcccagtgtccaacccagttgtcaaattcctactctcatctcttggatcctgtgcaaatgtcattttccttcccaaaccttggctgctttctggtttaaatatcgtctcttcctctcttgaacccccaacagatgtccttgaagtaaagcctccttgctctgctttgcattatttgtaaatgtattcatggcaaccatcccctctcccttgtaacctgaggggggtcaagaacctcatgggtttttttgttttgttttgtcttgttttattttaatgtctttgttcccaaaagggtatagagcttccattcatatggcaatctttattctttttctgtgccctgtgctgtgctagcttctcaggaatatgaagattaattagacaagtttccagcactctgagactttatagcccagtgcggaaggcagataagtcaaccgtaggtgtccacaagaactcattgaactgaattaattctggctgtagaagtgcagtcactttccttttagtatctccttacctcaatactcctacatacagacattagccagaccagacagcaggcttgtagtgggctggaaaggtctgtcctcacaagacttatagaggagtagtgtgtgtgatgtgacctgaggggcatcaaggaggttcgctgatccaaaaatatctctgttgctaagatgcctgatataccatcatttgtgattcattcatctgggttcagaattatcctatctctaaatgcacctgggaggaattactaaatgcctacattaactttttaaaattcttttcccttctttctttacctttttatcttccctttctcctttaaggcagctaaattgctctccctgaaagactcccaccacacaaaggagttaagagctcctccccttggtcccaatagcacctcgtgcctgttacagcagagatgttttatcctctaattcttatctgtttattgcttacctgagctcctccaccagactgagctcttaaaggggaaaactgtttttcatctctgtaatctgaacatagagcacagtgccaaacacaccgtggaatgttctgtaagattcctggaatgaccaggcggttctccatgaagatatacctgtttacccttcttctttgatagaatgacccatgagcatatgtaggggacaggcttgataaaagagaattgaagggcaaagagaagagaagagagataggaaaaaagggactctcgggaaatcacttctgtgcctagggccgtccttgatcctgctgtctgttgtccactttttggtttcattcatggataaaatgccttgtgaattaaacatgctgttttcttttgttttgcaatacatgatctgaagtaccatcagctggcaggggtttttccagaagcattttgtcaagtggaaaggtggctacacatgctccaattacaaaagcaaaaatgctttcaaatatcttttccttctgcatggattgagaacacaaacctcttctcatgcctgtctcttccattcgctacacctttgcctttgctcaaggaatatgcttgtaaagatatccaaaaagtgctttttccaagccccttgtggttgcagaatgcagacctgcaaaaatttcctcaagtaataggatgggaactataaaattgcatgtaggctggcacagtgtgtaatcttgcactttgggaggctgaggcgcgaggaatgcttgggcccagnaatttgagaccagcctgagcaacatagtgacacctcatctctacaaaaataagaaaataaggcaggaggatctcttgagcccgggaggttgagtctgcagtgagctctgatcctgccactgcactcctgcctgggaaacaggagtgaaactctgtctctggaaaaaaagaaagttacatatagattggagctgaaatcaagatggaagccaaggtgcctttggagtcagctattttctgtttttctctcattagctgaatgagctctttcttctgctctccttccctccacagactcattccattttcctcttgctcctctttccctatatgtctcttctctttcctcgtgtcttctgcctacctacaatttctgctccctcacaacttcacaggacccatcatggctgccccagacactcactgcctcatgatttcagattcaaaaatatatgcctccacgtagataccccatggttcatacttattttaatctttccagaaatatgttcttaaaattaatttttagcaaggtcaatcaataaattggttcatttgccctaacataatctagagctgattttatattgttacctatcatttgtaaccactagattatttattttttatatatacatatttatatatacatgtgtatatatctatatatacacatatatgctatatatagtacctatagaatgccaagatttgtgctaggtactggcaataccatcatgagaaaacacaaatctgccctagtgatattaatttctaactgattactttccttctaacttgccctcatctaatctaacttcaaatgagttctctttccaacacatgaatcaaaccatgatattccctgcttaagatcattactgacatttatcatctaaattcacataaggatgttttactacctgcttctgtttttatttctgacccctgcctgatttcttgtactttacgcttctacaaaaccaatgttaatccatgcccttgacttggcacatgacagaatcaggagaagtagaaaagggatgaagtaaagataaacttgagagacaggttgattcagtgtctaaatgttattatcctaactaaagtgtaaatatcacaaaacctaatattaccttaatatagtaaacatttgatatatttttgttagagtggattaaaaagtggcatttgtggttttatctggcttcagattcattaggaatgagtgagtgaaaggaacctaaaagggtgagttcattggtacatgaacaatttaatcctttttcggtctcaatagctattattgtggctaacaaagcaactcttataagttgcacacaaacaagaagtaggagagtgtttatgatgtcatcataaatatttataatagggacatgatacaatgttttgtgagacattgttgagaaaggttagacagtgaatgctcatttagatcaaaatcaaacacctgacacttgttgagcattttttaatttacaaagtatactcacatttattatcctatttaactcaatttttcaatctacattggaccattatcttcactgggtaagcattctctaatatctccatccttagactccacattccccatcagaaaaaaaaaacaaacaaacctgtatattttcttttcttttacagcaaagcccaagagttgtctatgttcattatcttgactttctcacctaacattcttgcgtcagtcaagtcagatctggtttttgttcccacaacttcactgaaattgcttttatcaaggtcattaggaatgcccatcgtgtctattcactctctcctcctggaaacactcttcttcacttggcttcagacacagtatatttcactggtttcccacctacctcactgggttttgctcctccacacttttaatggtcccgctcctcagttattgtctctcttactcccaaggtgatctcaaccagaccctagttttcaacatgatttgaaagctgatggctcccaatttctatcttcaacccagttctctcccttgagctctaaacttgtgtagccaacagccttcttaactctctttagataggcatctcaaacttacaatcctaaaactgaaccctggaggaccctgctgtaatgccagtgctccccttctcagcaagtggtgctaaattcatgcacagatgccgccctagctgaaaatgtagatgtcatccctaagtcctctcttttctcattcgcagcatcttgtctgtccacacgtccctagaatctgactagttattactacctacacctctgccaacctagagaaagccacctttattgtcacttagacttctggaacagctttttaacttggttcttcacttcctttctagctccttttgcagtgcagccaaagtgatactttcaaatgatccagtggtattccctttacattctgatgaaaacccagttttttctagaacttatagaccttcatgacctgggccctacctttctgttcaaacttagttctaccttaaggtatttgcatttactggctctgtctagaattttcctctaccagaccttctcataattcattccctcaactccttctgattctactcaaaggtaatctctcttcctcatcctacagctttttgtcccttaaccctctttattttccttattcccttactggtcaatatagtatatatttgcttaattatttatgatctctctttctctcagtggaatataattccaagaggtttgttttctcctgtattcccaacatctagaacagtgctataatattgtaggtgtccaacaaatagatattgaatgaaagaatgagatttaaatataaacatttaactagaagtcaagtgtttttttttcatgatcaaagcccatgtaaaaagtgatcatcttttcatattttttgatatctctagcatattctgaggaagtattttgagaacatgatttcagattcttttggataaatggagatacatgatattagagcacttgtgtaattgcagtttgtgttgatgaggtatgggtttatgatagagacatcagcatcatctccattggtacagaagcatttcacactaatattctactgcatagattgaggcataattccaacagtggcaggagaattgccctaaaaatataggaattcacaaattttaaacttttgacccagtgaaacttaaaagggcagcagagaaaacacaatggtattacaccaaacttaaaagctactgcacagcaacagaaacaatcaagagtgaggagataacctataggatgagaaaaggtaacttgcaaactgtgcacctgacaaggggttaatatccagcaaaagaacaagcaatgctatttcaaaatgggcaaaagacctgaatagacatgtaaatgagtgacaggtatgtcaaaaaaatattcaacatcactaattgtcagggaaatgcaaatcaaaaccacactccagtagagaaaggggaactcatatactgttggtaagaatgtaaattagtacagccattctggaaaatagtaaagagtttcctcaaaaaactaaaactagaagtaccatattatccagcaatcccactactagttatatattcaaagaaaatcagtatgtcaaagagatattgtcactcccatgtttattgccgcattattcacaatagccaaaatacggaatcaaactaagtgcctatcagtgggtaaatgaatacagcaaacatggcatatatacacaacggaatactatccaatcataacacaaaatgaaatcctgtcatttgtggcaacgtggttgaacttggaggacattatgttaagtgaaataagctaggcacagaaagacaaatactgcatgatctcactcatttgtggaatctaaaaaagatgatctcataaaagtagagattagaatagtggttaccagatgctgagaagggtagtgggtaaaggaagatggagagaagttagcaaaagggtacaaacttacagttaggaagaacaagttctgatgttctattacacaataaggtgacacgtaataaaaatgtattgtatatttcaagatagctacgagagagaattttgaaagttatcaccacaaagaatgataaatgttttaagtggtgaatgtgataattaccctgatttgatcattacataatgtgtacatgtattggaacatcacacttaccccataaatatgcacagttattagaggtcatttataaataaaataaaactttttttttttttttgagaaagagcctcactctgttgcccaggctggagtgtagtggcgcattcttggctcactgctttgcctcccaggttcaagcaattctcatgtctcagcctcccaggtagcagggactacaggtggtgtgccaccacgcccagctattttttttttttttgtatttttagtacagaaggggtttcaccatgttggccaggctagtctcaaactcctgacctctcacctgccttggcctcccaaagtgttgggattacaggcatgagccaccacacccggccaaaataaaacttttttaaaaaggagagaaaattcaagtattaaaaagccacttcagacaatctgtttgtaaagtgctatagataataggattttcgacatgggcttgagtaatcttgagggttttgcctggtgcctcaaatcctcgcatactggggtagtgtcttttattcctgtagaaataacgtaaaagctctaatattccctgtctttataggccatgaattaagtgttccctacactttcctgggaagcatttgaaattgcttcaaaatttacagagaatagagcagctgccatttattgtgcacctactgtgtgcccagcattttaagtctgttatcttatttgatctttaagttcctgaattaggtgtttgtagtagacatttatagttttgtcaatctggaatagcctcctccctcttctaggaaatgactcttcccattcacatgctggatgttttaatagggactttacatacagctcttgcctgctggccagaggagttgtctgggaccaagaatgaaccaaatagagtcctcacacaggatttttacagtgggtgttaaaaggggaaaattgtgccctctgatcacaataccataaggcataacccatgccaatgtcccacggtgtagaggagtaggactgagagaatttaccaggtatatggagaatagagacagaccagaaacaagagacccaaaggtgtttgaatcctttctgtcttctttgaggttggcgctgcctctaccctttcaatcctttcaattgcttctttatatgaaccaatggcttcctcatttgcttatgtccatttaattggctatttgacacttgcaattgcaggagctctacatagtgcagtaaattatatctcctttctatggatgcaacccccaacgcataaaaagttaaatcactttttaccagttacgtggctacatgagattaaattcaggtctgtgggttctaataaccttctgctctgtccagtgcattacattgccattctttttacacctctgaaagggtcgcactcagcagatagttaaatatgtgacccaatctatttgtttttttttaaatgtagacaagcatctaatgtagttacaagaataaaaagatatctaagtgtcctcacacacgtccttgcttgtttctttatttgtaaaatggccaagttgaaatctatgacctctgaattttgtttctcatggaaagttgtctaaaatcaaatagattcttagtgcctctgaagatctaattatactgactgtgcctctaggatttatttaaatgtgaaaacaaaaggaggtgcctctatcagacttcatgatcatgagccaagttggcttccagccctccagcaataactctagagtggcactctcagaacatcagtatcttattatttccagatcagactcctatcctaaaagacatgtgtgcattgtcaggaagaaattttaaaatacccagaaacaaccagtcttctggaagatgaaaggcatttttttttccttgaaaattgtagcatacaaccctaaatcttgaaaacgcattattttggattggttgctataagcaccttcctttggcattcaaattgggcatctaacaactcctacagaacatcagcagcgatatagatgattatgctgaaggtaaaattagtacagtgaagcctgtttcagcaccgacatgcacaaacaggtacaggcgtcaaacctgaacacacacacacacacacacaatcacacacaatggtcttttgttttctttttaatgtattctcagaagggtgctaagaaattgtcccctttgtcagcttttgatactcactcagtctgaagtatcagaataatcttaccctaaatgcatttctggtttaatactcaattctttgtaaaagaaaattggttcactttttaagagcgtctttttccacaggtgctctaattatttttaagttcatattgatatgatattgtattgcttacgagatgttttaatgcaaattacctatgtaaattatttaagttatgtaccaaacctataaggttattattattattatttatatttctcctgcttgtctttcatcatcacagaagctctattattatttgcatttaaagatgaagacactgagggtctatggaacaaatgacatcctgggacacacttcctagctgtgtgtcccaggataaggcagagctaataagtatatcccagaataagtcacttaccccattgatactctactctgacttcagataatgcaaagagcaagggatttacaaccaaacatgtctgggttgaaatctcaaattcacctaccagctttgtgactttaagcaggtgacttaatctcttggatcctttgttctattatctttaaaatgaaggcaataatagccaaattataaacttttagtaagtattaaataagcaactatatgaagcccttagcactcatcagtgtagagtaggtgctcactaaatggtgctagttttaattcaagtgctcttgattgcagaaaaaaaaaagtcacctatttgatgttgattatctgaggatctacggaagctccaaatattcagtgaaacttttatagtgtaacgtggtcagtgctaaggtgccctgaggctctagggatgttctccctcctcactttatccctaattaaaaactaatgcagagggacaagacttgtgatttcataggtcctttggtggtaaggttcatggacttctcttttttttttttttttttttttttttttttttgctattctggtgacccattcacatatagcatctaatctgtgacttccagcgaagggaaagagtcaattccatactcctgtgatgctctcatttgggactggtgtccaacagagcaggtaaactctgtgagagagtgcatcagatcttgggtaagccagccagcttctctctgttccatgactacagatctcagcttgatgcccagcctatgcaggttgagtatcccttatctgaaatgcttgggaccagaagtgtttcagattttggattttttttcaggtattggaatatttgcatatacttacttgttgagcatgccaaatttaaaaatctgaagctcaaaatgctccaatgagcctttcttttgtgcatcatgttggcacccaaaatgtttcagattttggagcatttcagaattgcggtttttggatttgagatgcttcatctgtacttgcttctggtcatagtgaatgaatgaggtggtgctggacgtttgataaactgaggagtgagttaagtactatcagttgttacaataatggatcaattaattatcaattgtgtttttgactgtaagaaacagaagacccaagtcaacttttattacttgaaggcaaatagttctactgtggtcatggaaaggctactgagcttcttttagttcagttttccaatatcctaaatcagggtaataatgctaccatccttctagatttgtcataatgtttcttactgtaagagattagccttagactccaaagaagtgtgctcaactcctttccccgcctcttactagctacagtaatctaatccaattcttcccgagactcacctgcagaatggaattaacaataccttcctcaaaagatgttgtgagtgaccaataagatttactggtaggtaggattgcacagggggcaataccttgcatcacatcccatacactgatgtttgttgaaattaaatctgacgtctgtatatttagtctcttatctattaaatgaagataagggtacttttctcagaagattgtgatggggattaaatgcaatgatatatgtgaaaacactttaggaactctataataatgtataaaagtaattattagtactattaatctcttataattatttgtattataatattacataaccattatattatttttgtatctcttatgatttctaagtcaatagtatagattcttatttttcatattaaagaattactcatgtaaagaaattgcttagaaataaattttcaaatgttttagtccataagatattgtctagagacacatttattataatataccttaacaaaacagtcatgttttagcatgtaaaattgttgagtgaaataatttttaaaatgtcatttaaagttagtgaggttaaaaattagtgaaataaaataagtgctgcctgtttaagtatttaacagctgcccagcttcccatcacacttcagattttcagcaccaccctatagaagatcttcacctggtactggtgtgtgacttactgctaagtgaagctgcctgcttaggtgaggttgttttggtgtcttttatcatgttagctgttgatggacagcctatgtgcatttgtactctcagataacatttattccttgttgtttttcctctagtgagctttaaaaacaagtcttgtggtgcatttgtctataagtatgcaagtccctgccatagactttttccattatttcctgatgttacccagccctctcagctagaaaccaaaatttactccatcaacaagacatgctttagtagatagcaaaaagagagccatttgcagacataatcctagagtaatatatttcgtatgtgtgttcttttttccccaacccaagaaattactactactggtggttcatctcttatgaaaagaccagcaatcaggccgggcacagtggcttacacctgtaatccagtgctttgggaggccaaggtgggtggatcacaaggtcaggagttcgaaaccagcctggccaacatggtgaaaccccatctctactaaaaaaaaaaaaaaaaagccgggggggggggcaggggcctgaaatttcagcaactcgggagggtgaggcagaaaaattgcttaaacccggggggctgaggttgcagtaagccaagactggccccccgcactccagcgtggacaaaaaaaaaagaccccgtctcaaaaaaaaaaaaaaaaaaaaaaaaaaaaaagaaagaaagaaagaaaaagaaagaaagaaagaaaagaccagcgatctctattataggcagtagggcataatgcatttgaaatatagagtctaagaacttaaattcgagccctgactctggatattctgtatgagttactttgagcacgctctgtctctcagacttaatttctttttctttttcttttcttttctttttttttttttttttttgagacagagtctcgctctgtcacccaggctggagtgcagtggcgcgcaatctcagcttactgcaagcaagctccacctcccgggttcatgccattctcctgcctcagcctcccgagtagctgggactacaggtgcccaccaccacgcctggctaatttttgtatttttagtagagacggggtttcactgtgttagccaggatggtctcgatctcctgaccttgagatctgcctgccttggcctcccaaagtgctgggattacaggggtaagccaccacgcctggccacttaatttctataacttacatttgaattcctgcactgctgctatatctaattaaccatttccttggacaagtcatgcaatccttcttaggctcactttctgttataaaatgagaataaaaatttttcatacttcagagaattgttgggaagattaagtaatgtaaagtttgaaaagtatggtttctggtatttataatagctattgttattaatactatgattattttaatattaacatggtagaatttgataagagatgcaaattgcagttcattattttttctaagactattatctgaggggcaatggatttctctcaggaaactcaaagaaatgcatttttcctcctttaattttagtgagctaaataaaattcatcgtaaaagaacttaattgtgcagataatataatttttatagagacaattctaagaagtacacacatacacaaactaaaaaaaaactaataaatgagagttcagcaaggtggcaggatataagatcaatacatacaaatcaattgtaattctatataatagcaatgaataatttgaaaattaaaaaaataattccctttataatagcatcaaaaagaataaaatatttaaaaataaatttgccaaggcagtgcaagacttttatgctgaaaactacaaaacatggtgaagaataattaaggaagacctaaataaatagaagaacgtcctatgttagtggattggaagactcaaattttaagatggtattactccccagattcgtttacagattcaaaataatccttatcaaaattccagttgctttcttttttttggagaaattgacaagctgatcctaggattcatatggaaatgcaagggacctataaaaaacaaatcaaaccttgaggggaaaaaaaaaaaagaaattggaggattcacactttccaatttaaaaatttactaaaatggtagtatagtactgacataaggtagacatatacagattaatagaatagaattgagaggctagaaataaatctatgcctgtataatcaatctatttttgaccaagatgccaaggcaattcaatgggggagtgggggaatcgccttttcaacaaataatacagagacaactggatatccacatgcaaaagaatggaattggacttctaatttactccatgtacaaaaactaaccaaagtgaatcatagatctaaaagtaagagctaaaagcataacaatctaataagaaaacacaggagtaaatattcatgacctagggttagtcaatggtttcttagctatgacaccaattacataaatgacaaagaaaaaatagatgaaatggatttcattaaagtgaaaaactttttgttcttccaaggacgctattaaaacagtgaaagggggctgggcgggttggctcacacctgcaattccaacgctttgggaggccgaggtgggcagatcacgaggtcaggagttagagacaagcctgaccaacatggtgaaaccccacctctactaaaaataaaaaagttagccgggcatggtggcgtgcacctgtaatctaagctactcaggaggctgaggcaggagactagcttgaacccaggaggtggaaattgcagtgagctgagatggtgccactgcactccagcctgggcaatagagcaagactctgtctcaaaaaaaaaaaaaaaaaagtgaaaggacaacccaccgaatgggagaaaatatttgttaatcatgtatctgataagggacatgtttctagaatacacaaagaatacttacaattcaacaacaaaaagccacagaccgtaactaacaaatgggcaaaggatttgaataggcatttctccaaagaagaaacacaaatggacaatgatcatatgaaagtagactgtcataccattagtcattaggaaaatgcaaatcaaaaccacaatgagatattgcttcacacccactaggatggctatggtcaataagacagccgataacaaatgctggagagaatgtagggaaattggaactctcatacatttctggtgggattgtaaaatggtgtgaccatattggaaaagtttgccagtttctcaaaatgttaaacataaagtacaacatgacccagcaagtttacacctatgtttatataccagaaaaatgatcacataaattcatgcaaaaacctgtacatgagtattcataaaagtattattcatacataatagctaaaaagtagaaacaactcaatgacaatcaacataaacaaaatgtgatatatgagtacaatagaatttattttggtagtaaaaagcaataaagtactgatatatgctacaaaatgaatgaatttttaaaactttaagtgaaagaacccatgcaatgtgtgattcaattaacatgaaatattcagaatgggccactccctgttagttaggagtaaatggaaatggagtttccttttggggtgatgaacatggggtgatagtggtgatggttgtaaactgtgaatatattaaaaaccattgaattggacattttataaatgtaaattttacagcatatgaattgtatcttaataaagcagttatttaaaagggaacttaagcattttgatatttctatggaagtgaaaaagaaaataggttacttcctttccattttcaagagtacaagcaaagtctctccctgtggttatggtggtaaattagcgtgaatcatgtggtgaattagccacatgtcatctttaaaattctccttatccaatattcctagatcatctttgctaattttatattttcttcataatctaaaaacaatactttagtagcattctcaaaagtcattgtattgccagattagattaaatgtaacatatgcaccaatgcctctctcttttctgttcagtccttctcaaaaattatattactctccaaacaacctgagaaaataaagccttttcctgtaagagagttaccttgaacattcactctgacccaaaatattattttcatgaaaatcacttctatttattatgaactagaccaactatcttctttctcattagctgaaaacctccagactggcatttgcttttattcatttataaattaattcatttttcaacaaatatttattgagttcctactttgtgttaggcactacagtaggcactgacaataaagcagtgaaaaaatacagaaatcctctttctcctggagtcacattctagtgcaagggtacagatgatacatataataaatatatggtatattagacagtgatgttgtgagaaaaaaaaagcaaaataaagagagtgctgttgtggtagggtggtcagacaagaccttgataacgaggtgacatttgaacaaggactgagtaagtgtgggagtgagctatggagcaaactgggtaagagcacatgaggcagagagaaaagccactgaaaaattccagaggcaggagcatgcctggcatggtgtagtaaccacaaagggtcactgtggcttcagcagtgtggggaatggggagaatgaggaatgaggaccgtacctaccgtcttggagaccgttgtaagaactttggctgtcattgtgaatagaagggaggccaactggaagatgttcagctggttaacgatgtgtgacctgagttacatttctaaagagttatcttagatgctattttgaaaataaactgtagcaggacaagggcataagaggaagtccagttagaaactgtttttcacaattaagtttcgaccatctgtgtacctgtattattttttacacctgttcctactattgcacaaaatgagtcctgtcctgaggtcagcttctctgagacattgtgaggtcaagaagatgagttatgaggcaaatctgaaataaggaaataaggcatcccttccaggaacacagatccaactaaaatgcaggattatcagcatccagaaggaagataaatgacactgtgccctgaaaaacagacaaaggggagaccattcaaacatgccttctcatttgattgcaaaccaatctttttcagtatgagtcatctacattttactcagaaatccagaatgccaggacccttgtcctctctgttgaatgcctttggagtataatttgtcactctgggaaatgccatcagttcttcagggatcagaggatctttgaacctaatactgttgtgtcgggttaattgtgatttcagtggcctttaagtgctattgtatctgcttagaggccagtcttcctgggccagcggtgaaagtttaaatatacaccagcatgcttagagcagtcaggggagttggcaccaaatctgaaagttgaattcattattccagtcacactgttatttctttgtgtaacatagatattttctttgctctctaatcttctgtgatgaaaaagacctataatctctccagggttttcgcctttgttgtggtctcacatatgtcattcaggaaatctgaccccgtgtgttaggtgttctctcatggtgcactgaatgagctaaacaacgcagaacgagtcagacaggaggttggatagctccaaatgcaatgcaaaccagagaaggggagagaattgtatttgattaatcagatcactgtgaactttggctaaaagaaactccagaacatgctgacatatcaccaggaacagaggagaaaatgcaacatgagaatgaaaacagaggatactgtttaaagggagatatttctgcaatttgggaaactcaaattatttcttttttggaggcatattggaaaaaatcctacacgcatcatgggaagctatcattcagatttggctacagattgattttctcactgatttcttaagcaaactattgacaatgttcctgttgaatgcttacatgttgattgttaagtcatttgtatttatatagaaaattatatttactctgcaatagtaagtggcatgccatcagaaagaaaaataaaaggacaaagagttaagtaataattatgtagcagcaagaacacagggaagataatgaaaatgaactaagtccctaggtgtgggatatgaatagcgtaccagcttttcaggatgttgcacattagttcctcaacaacattcgtggatatggtaggtgttggtgatgctatgaacatcaaattttatctgacagttcaggaatgaagctgggagatggtgttatatttaaaaacactgaataatgagaaattttaaataaaatgtttagggaaaatactatgctttgcaaaattatatgatttttaggaaaaatgcattgagtacatttacacattaaaatttccttaccttttcaaaaattataggagtagcttgtgaattgagtggagtttttctgtaagaataaattatctgtttcctcaggtcaggctaccatctgtgaatgatatttatttttgtctacttgaaatttaaatatgactattttaaaaaagcttttccctgttggattcttactaaaagaaatagaagataatgagcagttatgacaaattgtaaagattttctaactactcctagatatatatttttgtgtggctaatgaatagttgatgagtatgtcttttatcctctttttagagctatcagagagatttaaaatagttcatattgcttaaaatatttctggtgtccatgaactgtgtctccattttgaagattaacacagcaaaaacatggaattatgggtggtggaatgcaaagggtatcacaaactagaaccaagcaataatttgtgtagtttttaaactgatttacccttttgtaatattatagtaccaggtttacatgtataacaaagcagaggagtatggccatacattttaaataggagcattgcttgtttggagattaaactttgaactgctctgaatgtcaaggctttttggagagcagaaatcgtggctggcataatttttgtgtgcagtgcctacctggcatgatactttcgggtggtgttgatgagtaaatcagaaaagcaaagcactcttaattaagagttagagttacttactcttaattttgaacataattaattctcataaatcagtccacaattttgcctgctcacatttttttttctaggattggtagaaaatatcagagacattcaaggaaaaggaatttagaatttttactattcccataaaaagtggaattcaaaagaggattttgagtaattgggtcgaaaatgaaatcttttcttcccattttaataacttaagttgaaggcagtcatgtactttatgggatggaatattagtcttctgtaacaaaatataaaaggaagcatttccttgaaactagaaaacatggggttagacagttaagaaggttcttgttggctttcagacttttgatatataactaatgtcattgtaattttctttaaaaagaatatattaaaaagggaaaaattatttaaatttatctgatcacaaaactctttttggaggtgaagtgcctattaatatctcagtggacctctggaacagcctgggtggtgtgatgttgcttcagtgaaacaaacactgcctagagaaccagatcaatactgttgaaaattacagcttgtttaccagctatataacctcaagcaggcctgagctttaattttcttgtgtgtaaatgagtttataatgcttcccttgaaatattgtgaagattgtgatgtaatatgaagcacccagcatagttcctggcacatatgaagcactcaataaaaactaaacttgtattgagaatgaaatataaaaaaaattgatatgtgactcattgtggtgtttaaatgagatgtaaaagtacttagcgcaggaccttgtccaaagaattaactcagcaaattctagctttctttttaaaaaatttcaacttctgtttaagattcagggagtatatgtgcaggtttgttacactcgtatattgtgtgatgctgaggtttggagtacgattgatcccatcatgcaggtaatgagtatagtacctaatgggttgttttccagctctacccttatcccctgcttttggagtctacggtgtttattattcctgtctttgtgtccatgtgtatgcaatgtttagctcccacttataagtgagaacatgaggtatttgcttttctgttcctgcattaattcacttaggatgatggcctccagctgcatccatattgccgcaaaggacatgacttcattttttcttatggctgcatagtattccgtggtgtatatgtaccacattttctttatccaattcactgtgaatgggcacctatggtgattctatgtctttgctattgtgaatagtgctgtgatgaacatatgaatggatgtgtctttttggtagaacaatttattttcctttgggtatatgcccagtaatgggattgctggattgaatgatagttttgttttaagatctttgagaaatttccaaactgctttccacagtggctgacctaatttacattcttaccaacaatatataagtgttcccttttctctgcagcctcatcagaagtattgttttttgatgtgttgatgatagtaattctgactattgtaagatggtagctcatcatagtttttgtttgcatttttctgatgattagtgatgttgagaaatttttaaaagaattaatttagtaaatatcagcttctttccttttttcatctcctcatcttcacattatgtattatgtataagttggcaagctctttttttggaaatccagatcctttcagttataatatgatgtttaaaggaacttttaaaaattacacttatccattgaaatggttgattcactcatctttttggtatgtacttagtactttctatgtaccaggtactgtgctggcttctggaatctgaagttgtataattatcagatagagtgaacccccaaataaatgaatgattataaatcagcatgttaaaacaattattggtgtgtatacagtcttctttgggcacatggatacacctgtatcagattgggggtaaaggaggtgacccataatcagaattttgatggataagtaggccataagtaaacgaaaatcagaaggaagactttccaggcataatatagcatagcatgactcatcctggagaataactattgatgttctaagacacgagaaggaaaatgattgcttgtgacaacgctgaaaaggcaatagggctggataagccctcaagagaacttcaactttctcctgaaagctgtgagggaccataaagatattaaagcagagacgggcataagccaaaatatggggccaacctggagtcagaaactggtcagggtgtttcccatagaagctaagggtgcttccattgaaatcgaattgtattctattttaagaggaaaaaactcaagcaagtgctgctaaacccgcaagagtctatttgaatttacctatagtctttgaggtggcccaatggcttggactactcttatatggcaatttgcagtgatcaaaatggaacatcacaattaaactgttgaattgttaagtggtaaaatgttttcaagattcaacagctgaaggcttggaagcctgcctagagtatccttataagccctctacctgattaagatttatctgtttttatgtaactcactaagagttaagaataactttttattttctccagttgagctaatttgacttacttgggtttttttgtttgttggtttgttttttgatgcagagtcttgctgtgtcacccaggctggactacagtggtttgatcactgctcactgcaacctccacctcttgggctcaaagcaatcctcccacctcagcctcctgagtagcaggagccacgggcttgtgtcaccacacctggctaattttcatatttttggtagagatgggtttttgctgtgttactcaggctggtctcaaactcctgggctcaagcagtctgcctgccttggcctcccaaagtgctgagattacaggtgtcagccactgcacccaactttacttttttaagttactttacctacaaattttttcctgctgaactacagctaatggtgaattcaggtgagaaaataaaatggaactctacattttcaattacaccacgtcaattaattataggttaacgatcacttaaatgcagtaggggagctaaattttatgaactctaggggaaatccttgagcaaagagaagaattatgtttatagtaaaactacttcttaatttatttgtgttatatgtattcattttgtactacatgattctctaaagcaaggcacacttacatttagtaaatttagtaggtggaattatgtatgggcttaacctaaaacagtgttgcctactatattcatccattctcacactgctataaagaactaccttggccaggtgtggtggctcatacctgtaatcccagcactttaggaggccgaggcgggcggatcacaaggtcaggagttcgagaccagcctgaccaacatggtgaaaccccatctctactagaaatacaaaaattagccaggcgtggtggcacatgcctgtaatcccagctactcaggaggctgaggcaggagaatgacttgaacctgggaggtggaggttgcagtgagccgagattgcactccagcctgtgtgacagagccagactccatctcaaaaaaagcaacaacaacaacaacaacaacaacaacaacaacaacaaactacctgagactgggtaatttataaagaaaagagatttgatttactcgcagttccacaggctaaacaggaagcaaggctaggaggcctcaggaaacttacaatcatggcagaagatgaaggggaagcaaggcgcgtcttacatgatggcaggagagagagagggaggaggtgtcacgcttaaaccatcaaatctcatgagctgtccctcactatcaccagaacagcatggaggaacctgcccctatgatccaatcacctcccacctggtccctccctcaacacataagaattacaatttggattacaattctagatgagatttgtgtgggggcacagagccaaaccatatcacctaccaaggcaattatattagaagctaaattatagatgtgtaaacatttccagaaaccagtaaatacttctttattgaactagttgaaaatccatggagcccaacagagtgtatttgtcactgccaaacactgagaagaagccaagtttcagactctgcaagagctcattttgacaaccattaggttacagtcctatgtgtagttctgttgtgaagaatattttgttagctaaaagaagactcattgctttaattatctaagccagtatgagaaaaattgtgcctgagaccaggtccctgtgatgaaaataaaaccggtaaaatagtaacacttggacaaatccaaatatattatctctgactgttagtccctgatagatacagacagcggaaaacttcattccaatcaacaacttttttatttataaacatttaagactttaaaaaaagtattcttttttgggcaccgtggacatttttcttctcttgagatgtgagccttagcacgtgcagtgtgagtgaaatgcctgtactgtctactttggtgaggacaatgtatgtaacatttgaagaatgacattacttcttcctctctatgctatataatagaactgcatacatcctgctccagcagaacacacacttaaaagtcagtcttgtatgaatcatcacatatttgctctctttagcatggaactatgtattaggagggtacaaaataagtgtggtgcacttgcctcaaatttgggacagaaaaacaaactctttctgttaatgagattatttccatgaaatgtcatgcaaaagattttttaggagaaaaaaagattgataaaggacacattcttattcagtttaaaagctatttagtacttagaagctggttaaaggcagatggctcaggctatcagttcagtagacctaaaattgacctgagagctgatttcaggaagggatgttagcttgctcctaagaccttcctccctgtcagaaatgcagcttcctctttgattgcatagttgactcaacaaaggcaagatttcccacgctgaagacagatgggaaaattccaaggttggaggtcgactggcaagaagcaggcagctaatctaacggatagtgtcttgagagaaccccgcctacaaaaccacagatctaacacagcatgggggctaggcatcgcctaaaatctgcaggtccatccactcttggaacattccctgcctgagatcacagctacccaaagcaagctctgttgtgccaatcacagtgaattagtcagatagctaagacttccctcttaaataatgcagtaatttaattttcttgtgataattagaaggttgaaggaaataaatctcttaactatagccctcaatttattcaaatataagtgcagattatagcacagatgaagctatcatattaaaagataatcaagttataaaactggtatttctatcaaggctatttgtatcaactaattaaaagttatcttttgaattaccatgcctgctgaatcagctttcagtaaataatgctaatgtacttcacataaaatagttctatttaaagtaaactatttcttaaatatatgaattattcagactttgttgtggatggtatgcaaagaaacatcctaatcacaactaatctcacaattaatctttattttccttatgtagcataaaactgcattcacttcttaaatgaacacttattgagagtgctactctcttttgctctctggtcagtggccctggcaatacagtacttactaagaattagtccttgccaggttcctgtctaggttcctcctctaatgggagggacagatatctgccaataagaagacaatctgagaaatggcataaaagggctatgcataaagctgcatgaggtcccgaggagagctagcacctgcttcacagaggaggtgacatttgacttcagtctaacagtgtgacaagggaggcagtccagacagagagaaaaacaaatgcaaatgaatggagacagaaatgggcaggactggctcagagaaagataaaacctacagtatggttatgtgtattgtttatttccgtctccctcttgtcccatgttacccctaccacaaactgggatgtgaacaccatgaaggcaagaaatgttgtctgttttgttaattaatatatgccaaatggttagaatggtgtttagcacatggtaagggctcaatgaatacttgtgaaatgagtgaatgcatatgtgtgtgttagagagagttgtaactgtgtgacttgggacttaggcatatccaggaattcagaggtgactttgtagaaataacatctgacaagcgttggtctttgaccctcttacctccttgagaatacttgtcctgaaggaagattttatttgaaaactaataatcactctgtaaactttattctgacagcagcaaagtttcaaagcctaaaagatctcattgtccttgagcagtgtcataagctgcaggcaggaaaagtcaagtttaggttgtgtccacagcgcattgaagccagataataaatatgcagactctgtgacattttaggaaccttagttcaaggatatttactgttaggcctctggtgttttattgatttccaagtaagccacaggaatgccctgaagcctttcctaaaggtgggatcatcatggttcagtaaatagtcaaagctttacaggagtcgatacaggctttggtaggcattgttttttttagtaaaaatctagtgaaattccagtcacatcatcaaaaatcactttctaagatacaaaggaccaagtgttagaattggaattataattcacattttaagataccatcaggtagcctcacaatgcctactattccttaaaaaaaaaaaagaaaagacaatgaaaggagaaaattatgtatacatctcttattctaacttagtatttaataaagctcaggataggtaacatattttgaagttaccaagtaatgtttttttctcttctcccccccaaaaaaagaagtcaaaataaacaaaaatttattatattgtttttaaaaactactttaaatatctactctatgccaatttagggtaccttatacccactactttattcttcataacaatctattagataggaactcttatccctgtattgcatattaaaaacaggctgtggcagtgttaactttttcattttcatgaaaaaaatattgagcagaagctgaatgaaaactcggttccgtgttattctaaaactctttctaccatatgataaataaatacaacttttataattactgatttcttgattgctaatggcagtgattttaatttttaagttgttatttataaagtttataaatatttaaattttagttaatgaatatgtttaaattttcttgtggtctttaaaaacagaaaaatgatatttatttcccaatttatccagagctatttggtgctcttaactaaaaagattttcattgtttacaagtgcaagtcaacaaatttttatggcactcatggtatgggcaaggaggactatataagatatgctgcgtgctgaaaatgttgtaaataagtgaaatatcttcaaggaccttttgattacatttggataatgaaatatacatgctcaatatctagtctatgaatgtcaatcaactgttcagaaaaagatctatcttaactttttttttcttttttttgagacggagtttcaatcttgctgcgcaggctggagtgcaatggcgcgatctcggctcactgcaacctccacctccgggttcaagctattctcctgcctcagcctcctgagtagctgggattacaggcacctgccaggaaggactggataatttttttatttttagtagagacgaggtttcaccatgttggccaggctggtctcaaactcctgacctcaggtgatctgcctacctcggcctcccaaagtgctggattacaggcgtgagccaccatgcccggcccttaacttttcatgactttgattgattcaaagttactgattttttcagtttgtcagccttaccatggaaactcactcagcatatgaatttgtaatctcaaagcaccatcatatagtgaatgagcaacaccaggctatataagtgtctgtgcatatttagaaagcaatgataattttttcctttatttgtcaatggtcagtgcaggctgcatatgagatgggtagcaacacagaaaatgatggagggtaggaagtgaacacagaaacagaagttatgtgaagaagatccaggagagtgagaactactcattgcaaatatagccctctttatgggctgctcaaacatcaaaaatgtatttgaaggaaaaaaaagtatatcataataaatactcagtcaatataaactaacctatttgttccttactgaatttgcaatgtgtaggatgacacagatgccaatcaatagttgctgaatgatgaatagacaaatggtccaggacattcaggtcatttgaacaattgtagttgtcaataaatgattaattagcttgctgtatagactgctgtaggcttccacctctggcttcactgcaatttctggactgacatggtagattgtacacttcttaaaaacacagggaaccctcagagggtgggaattttaaataagtctaagtgtgattctagaaattctagaatcctttcttacgagttcggaatccaatgcttgtttcttcaatgaaaacaaggtccagggaggaaggaaatggggcctaattgaccaagagtccccctaaagatccatccctattctatagaaaggattttaaaacctcattgacaaggtagattaactgaaataataacttctaatgctcatggattcatttaacatttttcaaacacagcatgccattgtgtgcctgtttagtggaaacagaaatgagtaacatgttaatacttttcaggaattcgcagtcaggtagggaggaagccaacatgtgaacgaatacatgtattgcaatctggtaagtgtctgtcatgataaagtatttattaagaggaattaggagatacgtatggaggaaaggggcagaaaatatgtgaacatgtgaaacaacacagcaagttgaggaaatggaaagattatgacacaggtggatattaaaagtcacatcaggaaagtaaagttagaatgtgaatcaagctacgtatcatatagggtttgttgtgacatgttaaggaacagagttttttcataaagtctttgagaagtcctggaggtttgtaagcagggagtggcatggcacaatttataatttaaaaagataatcatagaaataaagctcaaggcagggaactgttcagaaggctgtagcagtaactcaggaaagaaatgataaaaagacatgaattagggcagccattgccagaaaaagagaaaattaattcaaaaaggcaaaagaggtggaatactccagggtaggtaacaacttgggcagctattcacttgtttatgacactggcaagatttgggccggccactggcagataaaacagattgcccacagttatgaaggggtcttatttgcttttattgttagtggtagtggtgatcagatgtggaaggcaagaatgattctcaagttgatagcttgatttactctgtggattgagagagagagagagaatgtgtgtatgtgtgtccactatctagcactgtgcctggcactgaaacacaataatacatattttaaaataaatatctgaaactaatagctgtcccatttagagtgtctctgaggtgttttattcatgtgtcatttcattattactgtgcatatgcagagtaattcaaggacatgtctctactaagagatgaagctgggtacaaatctgcatgtaacaggcctcaatgcccatatcaataccattgtgctgagtgaaaggaatgatgaatctagtcatggtagaaagtttagggcttgctcagttaggaagttcagacttgtaaataatgtacaagatatttggtagcttgaactgtaatttattgtctgtttcacagctaaatgaatgggagaggatgaaaacaaaacttattgtttaaatccaagtactaaagaacactttagatacccacccttgggtaaatattacccgattggcaagaagtttgttattctagctaacctaaactcttagtgctgacatttaaacacatgttctcttgttcgctcctcattgaaaaagcaagtctcctgcacaatggcctttcatatttctggaacctttttattaatttagaggaatacatatcatatatactgttagctaatgggataacataatgagctgatgatactgtttcttggacaatagacaattactgaagaatattgtttctgtgtttcttacccttggccaggttgactttctacattgaatagctttagattctattgagtgtggctacataatcttgagattgacattggtgttttcacccttatttttactcccaatcttctctctactccactttgtagttgttttaccaccagcattgtttgccaacaaatactccagaatgaaagggaagatgagattgcagtcagttccctacttttcactctggttagagtgttctatgcctagctttcctagggaactttaaaaacgaacaaaaatctatcttcagtgcatttattagtttgatttgctatgattggccttggatagccttagtagtttgaagttcccttcttttaaaaaaatagagggaaaaaaagatagagcaaagacctttactttaaataattatattaaatgctatttttttttatttcaatatattattatttactcaggcaagaaagaccattcctcaaaaaagggcttaaaaagtcagtaaataatatgttatgcctagcaagcaaaaaagcagttggctctgcttctttctttttggttttattttgaatgtttttgaaataaatgttaattcgcagagcactagcttccttcctgtcagttgtcacagggtttttcggtgtggttgttgtttgcttcctaaatgatggtaaagcttcgttatatctgtacctatttttttctgaacatttggacatttcttggaaacacgtcagaattcatcatttggctttattattgttttggggaaatataataatttgtttagaatttttatacaaaacatatatagagaatgatctttaataattttttaaagagacattaaagaaaattgctctcctatttaagttaaatgttttagtaagcattctcttatttaattcagttttaattgcattattaattatcatgaacaaaatattgctagggaaaaagctgaagagataatctaattgcagcttttactgctttgaatgataaagtacctttgatttggtgctgagccaggagggcttgattgataatatctgtctcagatgtcaccctgggagaaaagaataaaacctcagtagagttggtgcatagcagctgtctccgctgctccaatttttctgccccattgacgtcattgggaggtttcaaaccagtccagggtgtctagtaaacctgcacataaatgaaatgaagaaacagaaaaacagtgattcatagccccactctcactccaaagaggtggctgttatagcctttcagataatgggcagatgttttctcctttactgaattttaaaaagagaaaaaaatatcatcagctatccagaaatgtgggaaagcctcagacaaggaatgtgaattgcgtaagcccttctgaaatcagattatatcacaatgagccacatttgtccaaagttctcagatatcataacctgtatccagcttgtctttaaagtcaggaatatctgaagcagaatgtggcatgggaaacagctttctttggagacaagactgctctcaccacccagaccagttcccaacaccatttcctccccttctgtcttcacaggcagccttttgtgctgagttctaaatgaggggcccccatagacaatgataggaacacagagtagaattacagtgttttccagtaaagatttttttgtttccttgtttggggatatgtcttttttatcagcttaatacattaaatacatgataaactctaatcctccaaataatatcacaaagaaccatttctaaatgctatcacatagcaatttagggatacagctgagcattaatgataaaatatgttcagatgctaatttttcatctgctgggcaatttggctgctgggagcaaaagaatgttctccttttcccctcccctcatttaacacgagcaatgacaggaaggactcataataactgagtagctttcatttcttatttatccgacaagttccatgaaatacagttgaaaaatacctgaatctgtatagcactttaaagtttgcaaagcattatcactttcactttttccagttgcatttgttagacaaaactataaggcagatgttatatttatcaccatgttttccaatcctgtgccctatcttttgaaatcacttcaacttagcagagacgtgttgaccatttattacatgtggtaaattatttaaggtaaaagatacataagatatagttgtcagtcttagtgagcttagagaactgaggacaaaacaagcatccacacgtaccttaaatcacaaggcagaataacataggtgcataagacaaagtgttggcacctgacagtgggtcttgaatgaagggggcatttcagagcaatattcaaagactgataatgtttcaataggtaaagatgatggatgtggccttcgggagtcaagggacctgcgtgaacagagtcaaataggcaagatgatctgagggatgatgggaatgacacaaacaatgtttggaaactgaaggcagggatctggtgaaaggtaggtcaggctattagtggctgaccctaaatgccagggtgagaagtttgtaataataatgagacatttaaatgctgaagctagggagtaaaacaaatctgtcctttagtaaaatccatcaagcagtcaagtgtaaggtacatgagagaaaagaaaatctggctcatggtgccaattaggaggttccatataaatccagggtagggaggtttgaagaaacagaattataggaatttatttgtttaaaaatatttattgagcatctattatctgccagccactattccagaaatgagaatatggcaatcatagacaaactctctgcctttataggtctttcattttagtaaggaagaaatgaaaagcaaagaaaaattttaccaaaagctatgggttagaaccaacagcacttagtaacaggtagttctggatggaagaagattcaggattaacttagtaatttctctatttgagagaacatatcccttaacctgttagctaaaagtgcacttactctatgaatttagccttcttcacgtgctacagtaacacttcacatggataccacatagcttaaatataacgaggtgtagaagcacacttggcaaagcaccaagtaatacataaatattatccttattagttgtgaatggttgtttttactgtattgttattataagaaaatagtaatacctcagagtttttctttttttttttaactctttaactttattgtgccccagtttacttttttttattgtactttaagttttagggtacatgtgcacaacgtgcatgtttgttgcatatgtatacatgtgccatgttggtgtgctgcacccattaactcgtcatttaacattaggtatatctcctaatgctatccctcccccctcctcccaccccacaacaggccctggtgtgtgatgttccccttcctgtgtccatgtgttctcattgttcaattcccacctataagtgagaacatgcggtgtttggtttttttgtccttgcgatagtttgctgagaatgatggtttccagcttcatccatgtccctacaaaggacatgaactcatcgttttttatggctgcgtagtattacatggtgtatatgtgcctcattttcttaatccagtctatcattgttggacatttgggttggttccaaatctttgctattgtgaatagtgccgcaataaacatacgtgtgcatgtgtctttatagcagcatgatttataacccttcgggtatatacccagtaatgggattgctgggtcaaacggtatttctagttctagatccctgaggaatcgccacattgacttccacaatggttgaactagtttacagtcccaccaacagtgtaaaagtgttcctatttctccacatcctctccagcacctgttgtttcctgactttttaatgattgccattctaactggtgtgagatggtatctcattgtggttttgatttgcatttctctgatggccagtgatgatgagcattttttcatgtgttttttggctgcataaatgtcttcttttgagaagtgtctgttatcttcttcgcccactggttgatggagttgttttttcttgtaaatttgtttgagttcattgtagactctggatattagccctttgtcagatgagtagattgcaaaaattttctcccattctgtaggttgccttttcattctgatggtagtttcttttgctgtgcagaggctctttagtttaattagatcccatttgtcaattttggcttttgttgccattgcttttggtgttttagatatgaagtccttgcccatgcctatgtcttgaatggcattgcctaggttttcttctaggatttttatggttttaggtctaacatttaagtctttaacccatcttgaattaatttttgtataaggtgtaaggaagggatccagtttcagctttctacatatggctagccagttttcccagcaccatttattaaatagggaatcctttccccatttcttgtttttgtcatgtttgtcaaacatcagatagttttagatatgcggcattatttctgagggctctttctgttccattggtctatatctctgttttggtaccagcaccatgctgttttggttactgtagcctcattgtataatttgaagtcaggtagcgtgatgcctccagctttgttcttttggcttaggattcacttggtgatgcgggcccttttttggttccatatgaactttaaagtagttttttccaattcagtgaagaaagtcattggtaacttgatggagatagcatcgaatctataaatcaccttgggcagtatggccattttcacgatattgattcttcctacccatgagcatggaatgttcttccatttgtttgtatcatcttttatttcattgagcagtggtttgtagttctccttgaagaggtccttcacgtcccttataagttggattcctaggtattttattctctttgaagcaattgtgaatgggagttcagtcatgatttggctctgtttgtctgttattggtgtataagaatgcttgtgatttttgctcatcgattttgtatcctcagactttgctgaagttgcctatcagcttaaggagattttgggctgagaccatggggttttctagatatacaatcatctcatctgcaaacagggacaatttgacttcctcttttcctaattgaataccctttatttccttctcctgcctaattgcccgggccagagcttccaacactatgttgaataggagtgatgagagagggcatccctgtcttgtgccagttttcaaagggaatccttccagtttgtgcccattcagtatgatattggctgtgggtttgtcatagatggctcttattattttgagatatgtcccatcaatacctaatttattgagagtttttagtatgaaggttgttgaattttgtcaaaggccttttctgcatctgttgagataatcatgtagttttggtcgttggttctgtttatatgctggattacgtttattgatttgcatatgttgaaccagccttgcatcccagggatgaagcccacttgatcatggtggataagctttttgatgtgctgctggattcagtttgccagtattttactgaggatttttgcatcaatgttcatcaagaatattggtctaaaattctcttttttggttgtgtctctgccagtctttggtatcaggatgatgctggccgcataaaatgcattagggaggattccctctttttctgttgattggaatagtttcagaaggaatggtaccagttcctccttgtacctctggtagaatttggctgtgaatccatctggtcctggactctttttggttggtaagctattgattattgccacaatttcagaccctgttattggtctattcaaagatttaacttcttcctggtttagtcttgggagggcatatgtgtcgaagaatttatccatttcttctagattttctagtttatttgcgtagaggtgtttgtagtattctctgatggtagttggtatttctgtgggatctgtggtgatatcccctttatcattttttattgcatctgtttgattcttctctcttttcttctttattagtcttgctagcggtctatcaattttgttgatcctttcaaaaaaccagctcctggattcattgatttttttgaagggttttctgtgtctctatttccttcagttctgctctgattttagttatttcttgccttctgctagcttttgaaagtgtttgctcttgcttttctagttcttttaattgtgatgttggggtgtcaattttagatctttcctgctttctcttgtgggcatttagtgctataaatttccctctacacactgctttgaatgtgtcccagagattctggtatgttgtgtctttgttctcgttggtttcaaagaacatctttatttctgccttcattttgttatgtacccagtagtcattcaggagcaggttgttcagtttccatgtagttgagtagttttgagtgagtttcttaatcctgagttctagtttgattgcactgtggtctgagagacagtttgttataatttctgttcttttacatttgttgaggagtgttttacttccaactatgtggtcaattttgcaataggtgtggtgtggtgctgaaaagaatgtatattctgttgatttggggtggagagttctgtagatagctattaggtccacttggtgcagagctgaattcaattcctgggtatccttgttaactttctgtctcgttgatctgtctaatgttgacagtggggtgttaaagtctcccattattattgtgtgggagtctaagtctctttgtaggtcacacaggacttgctttatgaatctgggtgctcctgtattgggtgcatatatatttaggatagttagctcttcttgttgaattgatccctttaccattatgtaatggccttctttgtctcttttgatctttgttggtttaaagtctgttttatcagagactaggattgcaacccctgccttttttgttttccatttgcttggtagatcttcctccatgcctttattttgagcctatgtgtgtctctgcacatgagatgggtttcctgaatacagcacactgatcggtcttgactgtttatccaatttgccagtctgtgtcttttaattggagcatttagtccatttacatttaaggttagtattgttatgtgtgaatttgatcctgtcattatgatgttagctgggtattttgctcattagttgacgcagtttcttcctatcctcgatggactttacaatttggcatgtctttgcagtggctggtaccagtttttcctttctatgtttagtgcttccttcaggagctcttttagggcaagcctggtggtgacaaaatctctcagcatttgcttgtctataagtatttcatttctccttcacttatgaagcttagtttggctggatatgaaattctgggttgaaaattcttttctttaagaatgttgaatattggcccccactctctgctggcttgtagagtttctgccaagagatcagctgttagtctgatggtttccctttgtgggtaacctgacctttctctctggctgcccttaacattttttccttcatttcaactttggtgaatctgacaattatatgtcttggagttgctcttctcgaggagtatctttgtggcattctctgtatttcctgaagttgaatgttggcctaccttgctagattggggaagttctcctggataatatcctgcagagtgttttccaacttggttccattctccctgtcactttcaggtacaccaatcagacgtagatttggccttttcacatagtcccatatttcttggaggctttgtttgtttctttttattcttttttctctatacttctcttctcgcttcatttcattcatttgatcttccgtcattgataccctctcttccagttgatcgaataggctattgaggcttgtgcattcgtcacgtagttctcatgccatggttttcagctccctcaggtcctttaaggacttctctgcattggttattctagttggccattcatctaatttttttttcaaggtttttaacttcattgccatgagttcgaacttcctcctttagcttggagtagtttgattgtctgacgccttcttctctcaactcatcaaagtcattctccatccagctttgttccattgctggtgaggagctgcattcctttggaggaggagaggtgctctgctttttagagtttccagtttttctgctctgttttttccccatctttgtggttttatctacctttggtctttgatgatggtgatgaagaaatggggttttggtgtggatgtcctttctgtttgttagttttccttctaacagtcaggactctcagctgcacgtctgttggagtttactggaggtccactccagaccctgtttgcctgggtatcagcagtggaggctgcagaacagctgatattggtgaacagcaaatgttgctgcctgatcattcctctggaagttttgtctcagaggagtacctggccgtgtgagatgtcagtctgcctctactggggggtgcctcccagttaggctactcgggggtcaaggacccacttgaggaggcagtctgtccattctcagatctccagctgcgtgctgggagaaccactattctcttcaaagctgtcagacagggacattgaagtctgcagaggtttttgctgccttttgtttggctatgccctgcccccagaggtggagtctacagaggcaggcaggcctccttgagctgtggtgggctccacccagttcattcttcccagccactttgtttacctactcaagccttggcaatggcgggcacccctcccccagcctcgctgcctgcaaccttgcagtttgatctcagactgctgtgctaacaatgagtgaggctgtgtgggcataggaacctctagagccaggcgtggtataaatctcctgtatgccatttgctaagaccattgaaagagtgcagtattagggtgggagtgacgtaattttccgggtgccatctgtcacccctttcttgactagaaaagggaattccttgactccgtgggctcctggagtgagaggatgcctcagccctgctttggctcatactaggtgtgctgcacgtgctgtcctgtacccagtgtccaacactccccagtaagatgaacccggtacctcagttggtaatgcagaaatcacccgtcttctgcgtcactcacgttgggagctgtagactggagctgttcctattcagccatcttgactccaccccctggagtttttcatttggtaaattgtttctcattttaattatttgaaagcaaagagttgaaatatatttatattcattatgtgtcttcaaataatctcagaaaagtttggaccttaccttaccatataatcttttgattttgttgctgctgtgatttctgcttacatgttagtgtagtatacattatgaaaaatggtatgtattgtctagggagctcctaaaacttgtatctaggactccagtacctaatggagaaagaggtcaattcagcaaagaatgtgttttatgtattgataaattttgtgagctacatcctcataagcatttaatactttaaacacttaagcatcttctttgaggttatttatgtgaatgatttattagagagtttaggttatttctcctatacattcacaagtctcataacatttaaaagactgatctgttgctcctgttattagtaaaattcattttacaatgtatatttaaaaattagcagaaattaaaatcttaattcacatcaaagtaaatgtgagccacataatcagattactgtctagtcaatagactacctagggttatcaataatgaccctacttatgtgtctgcctttttgtcaagttaagaataagaatctacatgcaagtggaaggggagaatcgagagcgttacctagataattgtctttaaggagtattagtcccttttcacgctgctgataaagacatacccgagactgggtaatttataaaggaaaagaggttgaatggactcacagttccacgtggctggggagacttcacaatcatggcagaaggcaaaaggcacgtttcacatagcagcagaccagggggaatgagaaccaagcaaaagggaaaacccttataaaaccatcagatcttgtgagacttattcactaccttgagaatagtatgggggaaaacaccccatgatttcaattattttccacgggtccctcccacaacacttgggaattatgggagctacagttcaagatgagatttgggtggggacacagccaaaccatatcagaagtctttttaggaaaaataagatgataataaaatgaacttcttacattgataactatccctgatgtactaaaaaaggcttacttggtaagtatttactaatatatatgtgtatgtctagggccttgtgtccaaaactgttctatctctctctctctgtgtctctttgtatcaattgaagactcttttgtgatcctttctacccaactgaagatcaggcagataagcaaataatttgatcagtgacttctttttgcctataaaattttaatttaaaaaaaccatttggtaatcataatcccctgttgtcttttcacttagaatttagactcaaccgaactgatctcaatctctgacaagcccttcccaattctgcccactgcccttctgcatcctcctagctcttctcactgtactgtccttactgtttgcttgtccatatcatgctgtgcttacctatttatatgattctttcacctcttggccatgaaaccccggaagatcatgactgtttccttcatatttatacccattacccctagcggagtctcagtcacctgtgaggttctcaagaaatataggaaatatccgttaaagtgaatattcttttgacaatggagacatggctttcatggtttcggggaaaacttttattgtcctaaaaaagagtccctttatcctttatgccaaatacaaaggctgtatctctcatcaagtcttagggtaatttctgagtcttgagacatatggcaattaataataataataatagcaggagcagcaacagtttactgagcacttggtgtttgccaggcctgtgttaagcaccaaacatataatcatacctcagtctatctatattttgcagatgaagaaacaaaaagtttaaggtacttgcccaaagtcacacaaatataaagacttggtaaagtcaagattaacccaagtttttctgccattaaagcctacttttaacagttatgaagaattgctaaattgacacataacaaatccatttaaaaagatatggattttatttgtacacagagctggaatatgtctgtcagtgtgggaaggtacctgacttcatgatcatatatggaaagaaagtaagatgtttccacaagaaaggaatttcatgttgtttgtgtagtcctttaaacatctggatatattttgaaactaattttttaaactgcctttggtttgagtctttgaaaatgaaaaatatattttatgaagcagtcactgttcagggagccaaaatacttgaattctaatctcaactttgtattttaccaaaccagattcctgaaacatcctaggctatttcttggttgtcaaatcaatgatggaatgatattgtaggttcaccatatcccgttccttcctgttcctctagtgtgcttcacttacttcggagaagtcactgaagaccaatttcaaattatttttggtgagaaaaagcctgagacctgtgagggatacttcagggaaatgttatcatctcagagctttaaaataatcatctcccctgggttctccgtggtttggaattcttatgaagcttaatgcgtgaaaaggacaacagttttcaaaatgttggcagtttcctacatttgaccttttaacatttagaaacattggtcaaggtatgtttaaattctttaaattgtagctgacctttggagaaataaacataaattaaggttattacctacatggaatgcttatatggaactattagcaaagtaaaagtagtacgttaagtacaccatggaaaaatgcttttagagactgaaatcattatagtgatagagtcactgagctggaaagaaacttgggaagccatctagttcacccttctgtctgaggccatgtcacatttgaaccataacaagagatttgaaatcttttttttttttttttgggagattcaacaacttctcttggtatctagttctagtaactgacaatctcacctgtcagcaagtcgtttttcatagctaacctaaatccctagggctgcactttgaactaactcactttcttctgttcttagatgtagaaaacagctcatataatgactccttttgcacaggaagattgctatcaagatgttattcagctctcatcctaaagccaaattccctgaacctttcttcacaatttctttgtgtctaaccttttagtaacttaccttttgcacatatggctctacccaagtcttcatcttctcaattgtgagacccacaatactatctaatagcatacttagctattatactcgatgaattgcttagttgaatatgctatgttaacatcataacttggatgctgtttctgtttaacaaaacatataatgaaaacttttcctttaaacaatagaaacagaaaacattgtattgacagcaagaaaggttacaagggtgtccatcgccttaaaattccccaatttataaaaatcatggactaaaaatgaataaattaaggaagataatttaacaaatgtttataactcctttacatttctactccatgctgagcagaaggttaatgaagtaaaataagttttggtatcaaacaactccaatttcgtactccatgtaactggacttaatgagcaagtatattctaacttctaaggtttattggcctgatcttgcagaatatgaaaataataaaaaaggtgagttccttgaggacagggtcattcttatttatttttgtatctatgtgagttccttgaggacaagggccatttcttatttatttttgtatctctagggccttccccaattcataacagagattaacactcacttatgtttgaattttactgaaaggttgctcgtgagaattaaatgagattatatatgtgaaaatatttggtcagctgttaaactctatataattgtgagtcattaccattagtaattttaaaagagtgatgattagtaatgagtttttaaaaattaaaccaaactttggtttacagctgtctttccaggaacatttgttattcatttgttgcaaatctacacatgagtttcctaaaattaataatcagtggtacaaagctggccatttggagtttaatgcttagactcttttgagcaaaatgagaatgacaagggaactcagatgtgaccaaggtgacctcccagagccaatccaaattcactctggcaccagatgaataggactaccctgaaaaattaataattttccagagcttccatgaccttgtgttcatttccctatgtgggagagaaaaaatcagtggtatctttgactgacaatagcacccaaaggtttaaataacattgcttcatttattaacaacatgactaaaaggagtctttaagtacttgaccttctttcatggggaacagccaagggccagaggaatacacggacttaaaaagcagtgtttatgaataatactttagatctttctaaagagcaccatcccctgttttgctatttggtttacaaatacttagtttaagaaagaagaactttggaatcaaagtagttcagattgagatcttagctctgctatacaagtaggtccttgggacaattacttagcttttctaacctcaattttgctttctgtaaaatggaaaatatattacctagctcataagtttcctggcactgttgggttcttggtaacttcattacctcctacaccttctgatctccttcttcacctattttgttagtggcagttggctggctgatatgatttacaaagctagtatgtccaatgtatatgagacccctgcaagaagcagcaaaaactatttgataaacattttattgaatttatttccaagagtggtattgattgcatgataatgacacaaagctataaacctccttcttcacctattttgttagtggtcgttggctggctgatatgatttacaaagctagtatgtccaatgtatacgagacccctgcaagaagcagcaaaaactatttgataaacattttattgaatttatttccaagagtggtattgattgcatgataatgacacaaagctagaaacctcagagaatgtattgctttttgaggaattaacttaaaactagaaaaatacagctttaaatgtaaaaattgactagcctgccaagggcaaatagcataggaaggagttctggaagggcaactggcggccctgggtttaggcccacctgtgccacaaactagaaaaccctggacaagtcacttttcttctctgaactttacttgcttcatctttaaaataggaggatgatgccctaggcctttttctgcatcaacagtctacagagctgagagtcaagcattgatactctcccaaacagatgctgcctaggcacagaagggttcaggctccatcttgttttgctgtcaaaccttcaaaaagtgaggactgtggcctttaggccagcacatctctgtagagaaaacatcagttgccccactgtgaagattctgaaggcagtttggtccctcctcccccaatttattttctagatgaagaacatgctatctcatttagtgagaaagtttgtcacaaaaaagaaaagtcagccataaaaaatgatgagttcatgtcctttgtagggacatggatgaaattggaaatcatcattctcagtaaactatcgcaagaacaaaaaaccaaacaccgcatattctcactcataggtgggaattgaacagtgagatcacatggacacaggaaggggaatatcacactctggggactgtggtggggtggggggaggggggagggatagcattgggagatatacctaatgctagatgacaagttagtgggggtagcgcaccagcatggcacatgtatacatatgtaactaacctacacaatatgcacatgtaccctaaaacttaaagtataacaataataaaaaataacaaaaaagaaacataagagctcaggataaagaaaataacaaaattggaatgcaaaccataccaatttgaaaacaggcaaataatttattttgctaaatcaaatttcagagattgaagtctggatctgtttatgttgccgcagtccctcttgaaattaccaaataggagtatcactcttggtaatttaatttttatggagctggaaggtgtagatatttgtgaatctcccacttaaggcctaaattagatttcttcatttagaataagaaatatgtttaaaaagcatacattttatttttttctccacgttttctgcacctgaaaagggatcgtgtctaattgtatgctcagcttagagccatattcttggcttaacagagataaatcaactcactccactaaactaaaaggcaaaataacttatagatgttaatctctcatagcttgcagcagtctttcctattattagagggagcaaaaaaaatcagccagagacacacatgatatttatacgtatttaaaacggaatattcaggaatgttgtttctcacagttaaacctgtgctgaaatactttacagatatgcaacttaaactacagtgaaaaaccatctttgctgttttcctgtgtgctgatgagaaagaatatacatctcaagagtagtggtttcttcaaaatccccaatctacatcttggaactctattctgtgcaaattcatttctcctcaaagatgaaaataaataaacttatttaagacttaagggtaaggcaaacaaaaaatgcatagacaaaatttagaatacctaataatctgggatttaacctgaaagtctttaaaatgcactagcatttaatttgagagagagaaaaaaaagaagaccctactgctgtatatttctgttcaaaatttactgctgtttctctggaatagaaaagaagcagtttctgttgagttggcaaattaatgtgcttgaacagaataaagagagcaggccaaggaaatcacactgcttttaatactttctttgcaaagagcttttttggaccaagtccatgactgctacaagtaagtactcagttgcaagaagaatgtgagtagagatcaagtaggctggagctttttgttaattcactcttaatgttactaatgttaatttgaatctggagacttaagatcaaaccaagcggctaatattctgcaaggccccgttccctttcctagtgattcctgggggtagaaatcatttcttaaacctaatataaaaatctactcttctgagtgattgcaaaatagctggtgttagagttctgtatcttacctttctattcacttattatgtgcacagctactttttaaaatattttttctatttataaaagaagtgcataaccatcatggaaaatttataaaagtaacaaaaaacataaacaaaaaaatcatttgtatttgacaaaacattcataaagcatagtcaagctagataagcaaaaagtggcatttattttaagtataattcatcttagagaaactacaatagaaatacatgtgtttccaaagcctcaaagactgttaagattcacttggggcctctttctgctcctctctgcacttctcctgtgtttttattttattttattttattattattatgctttaagttttagggtacttgtgcacaacgtgcaggtttgttacatatgtatacatgtgccatgtcggtgtactgcacccattaactcgtcatttagaattaggtatatctcctaatgctatccctcccccttccccccaccccacaacagtccctggagtgtgatgttgcccttcctgtgtccatgtgttctcgttgttcaattcccacctatgagtgagaacatgcggtgtttggttttttgtccttgtgatagttttctgagagtgatgatttcaagtttcatccatgtccctacaaaggacatgaactcatcattttttatggctgcatagtattccatggtgtatatgtgccacattttcttaatccagtctatcgttgttggacatttgggttggttccaagtctttgctattgtgaataatgctgcaataaacatacgtgtgcatgtgtctttatagcagcatgatttatagtcctttgggtatatacccagtaatgggatggctgggtcaaatggtatttctagttctagatccctgaggaatcgccacactgactgccacaatggttgaactagtttacagtcccaccaacagtgtaaaagtattcctatttctccacatcctctccagcacctgttgtttcctgactttttaatgatcgccattctaactggtgtgagatggtatctcattgcagttttgatttgcatttctctgatggccagtgatgatgagcattttttcatgtgttttttggctgcataaatggcttcttttgagaagtgtctgttcatatccttcgcccactttttttgttttgtttgtttgtttgtttttttcttgtaaatttgtttgagttcattgtagattctggatattagccctttgtcagatgaataggttgcaaaaattttctcccattttgtaggttgcctcccattttgtaggtttctcccattttgacacgatcccttttcaggtgcagaaaatgtggagaaaaaaataaaatgtatgctttttaaacatatttcttattctaaatgaagaaatctaatttaggccttaagtaggagattcacaaatatctacaccttccagctccataaaaattaaattaccaagagtgatactcctatttggtaatttcaagagggactgcagcaacataggttgatggtagtttcttttgctgtgcagaagctcattagtttaattagatcccatttgtcaattttggcttttgttgccattgcttttggtgttttagacatgaagtccttgcccaggcctatgtcctgaatggtattgcctaggttttcttctagggtttttatggttttaggtctaacatttaagtctctaatccatcttgaattaatttttgtataaggtgtaaggaagggatccagtttcagctttgtacatatggctagccagttttcccagcaccatttattaaatagggaatcctttcaccatttcttgtttttgtcaggtttgtcaaagatcagatagttgtagatatatggcattatttccgagggttctgttctgttccattggtctatatctctgttttggtagcagtaccatgctgttttggttactgtagccttatagtatagtttgaagtcaggtagcgtgatgcctccggctttgttcttttggcttaggattgacttggcgatgagggctcttttttggttccatatgaactttacagtagttttttccaattctgtgaagaaagtcattggtagcttgatggggatggcactgaatctataaattaccttgggcagtatggccattttcacgatattgattcttcctacgcgtgagcatggaatgttcttccatttgtttgtatcctcttttatttcattgagcagtggtctgtagttctcctttaagaggtccttcacgtcccttgtaagttggattcctaggtattttattctctttgaagcaattgtgaatgggagttcactcatgatttggctctctgtttgtctgttattggtgtataagaatgcttgtgatttttgtacactgattttgtgtcctgagactttgctgaagttgcttatcagcttaaggagattttgggctgagacagtggggttttctagatatacaatcatgtcatctgcaaacagggagaacttacttcctcttttcctaactaaataccctttatttccttctcctacctaattgccctggccagaacttccaacactatgttgaataggagtggtgagagaggacatccctgtcttgtgccagttttcaaagggaatgcttccagtttttgcccattcagtatgatattggctgtgggtttgtcatagatagctcttattattttgagatacatcccatcaatacctaatttattgagagtttttggaatgaagcattgttgaattttgtcaaaggccttttctgcatctattgagataatcatgtggtttttgtcttcggttctgtttatatgctggattacatttattgatttgtgcatgttgagccagccttgcatcccagggatgaagcccacttgatcatggtggataagctttttgatgtgttgctggattcggtttgccagtattttactgaggatttttgcatcaatgttcatcaaggatattggtctaaaattctcttttttggttgtgtctctgccaggctttggtatcaggatgatgctggcctcataaaatgagttagggaggattccctctttttctattgattggaatagtttcagaaggaatggtgccagttcctccttgtacctctggtagaatttggctgtgaatccatctggtcctggactctttttggttggtaagctatttttattgccacaatttcagaccctgttattggtctattcaaagatttaacttcttccttgtttagtcttgggagggcatatgtgtcgaggaatttatccatttcttctagattttctagtttatttgcgtagaggtgtttgtagtattctctgatggtagttggtatttctgtgggatctgtggtgatatcccctttgtcatttttttattgcatctgtttgattcttctctcttttcttctttattagtcttgctagcggtctatcaattttgttgatcctttcaaaaaaccagctcctggattcattgatttttttgaagggttttctgtgtctctatttccttcagttctgctctgattttagttatttcttgccttctgctagcttttgaatgtgtttgctcttgcttttctagttcttttaattgtgatgttggggtgtcaattttagatctttcctgctttctcttgtgggcattgagtgctataaatttccctctacacactgctttgaatgtgtcccacagattctggtatgttgtgtctttgttctcattggtttcaaagaacatctttatttctgccttcatttcgttatgtacccagtagtcattcaggagcaggttgttcagtttccatgtagttgagcagttttgagtgagtttcttaatcctgagttctagtttgattgcactgtggtctgagagacagtttgttataatttctgttcttttacatttgttgaggagtgttttacttccaactatgtggtcaattttggaataggtgtggtgtggtgctgaaaagaatgtatattctgttgatttggggtggagagttctgtagatatctattaggtccacttggtgcagagctgaattcaattcctgggtatccttgttaactttctgtctcgttgatctgtctaatgttgacagtggggtgttaaagtcttccattattatttcgtgggagtctaagtctctttgtaggtcatgcaggacttgctttatgaatctgggtgcgcctgtattgggtgcatatatatttaggatagttagctcttcttgttgaattgatccctttaccattatgtaatggccttctttgtctcttttgatctttgttggtttaaaatctgttttatcagagactaggattgcaacccctgcctttttttgttttccatttgtttggtagatcttcctccatccctttattttgagtctacgtgtgtctctgcacatgagatgggtttcctgaatacagcacactgatgggtcttgactctttatccaattttccagtctgtgtcttttaactggagcatttagcccatttacatttaaagttaatattgttatgtgtgaatttgatcctgtcattatgatgttagctggttattttgctcgttagttgatgcagtttcttcctagccttgatggtctttacaatttggcatgtttttgcagtggctgataccggttgttcatttccatgtttagtgcttccttcaggagctcttttagggcaagcctggtggtgacaaaatctctcagcatttgcttgtctgtaaagtatttcatttctccttcacttatgaagcttagtttggctggatatgaaattctgggttgaaaattcttttctttaagaatgttgaatattggcccccactgtcttctggcttgtagagtttctgccgagagatctgctgttactctgatgggcttccctttgtgggtaacccgacctttctctctggctgcccttaacattttttccttcatttcaactttggtgaatctgacaattatatgtcttggagttgctcttctcaaggagtatctttgtggcattctctgtatttcctgaatctgaagttggcctgccttgctagattggggaagttctcctgggtaatatcctgcagagtgttttccaacttggttccattctccctgtcactttcaggtacaccaatcagacgtagatttggtcttttcacatagtcccatatgtcttggagactttgttcgtttctttttattatttttttctcttaacttcccttcttgcttcgtttcattcatttcatctttcatcactgataccctttcttccagttgttcgcatcggctcctgaggcttctgcattcttcatgtagttctcgagccttggctttcagctccatcagctcctttaagcacttctctgcattggttattctagttattcatctaattttttttcaaagtttttaacttctttgccattgatttgaatttcctcctttagcttggagtagtttgatcatctgaagccttcttctctcaactcgtcaagtcattctccgtccagctttgttccattactggtgaggaactgcattcctttggaggaggagaggtgctctgctttttagagtttccagtttttctgctctgttttttccccatctttgtggttttatctacttttggtctttgatgatggtgacgtacagatgggtttttagtgtggatgtcctttctgtttgttagttttccttctaacagacaggaccctcagctgcaggtctgttggagtttgctagaggtccattccagaccctgtttgcctgggtatcagcagcggtggctgcagaacagcagattttcgtgaaccgcaaatgctgctgcctgatgggtcctctggaagttttgtctaagaggagtacccggccgtgtgaggtgtcagtctgcccctactgggcagtacctcccagttaggctgctcgggggtcagggacccacttgaggcagcagtctgcctgttgtcagatctccagctgtgtgctgggagaacctctactctcttcaaagctgtcagacagggacgttaaagtttgcagaggttactgctgtctttttgtttgtctgtgccctgcccccagaggtggagcctacagaggccggcaggcctccttgagctgtggtgggctccacccagtttgagcttcctggctgctttgtttacctaagcaagcctgggcaatggcaggtgcccctcccccagcctcactgccaccttgcagtctgatctcagactgctgtgctagcaatcaacgagactccatgggcgtaggatcctctgagccatgtgcaggatataatctcctggtgtgccgttttttaagcccattggaaaagcgcagaattagggtgggagtgacccgattttccaggtgccgtctgtcaaccttttctttgactaggaaagggaactccctgaccccttgcacttccagagggaggcaatgccttgccctgcttcagctcgctcacggtgtgctgcacccactcttctgcacccactgtctggcactccctagtgagatgaacccagtacctcagatggaaatgcagaaatcacccgtcttctgtgtcgctcatgctgggagctgtagactggagctattcctattcggccatcttggctccaccctctcctgtgttcttaagtattttggtagttcagccttttccaacccatgtgactgaaagcatggccatgcctaagttttagaatttatggctcatctatgcagagaaaaacttaagcattatactccctctcctttcatacttagattatttagaaagagactcatgggcccaactgaggtcaatagcccaccctagcacagtcatatacagcacaggctggggcagaacagtaaaatgtcaagacatagttgcttctactctactcaagtggcctagggaatggggacaaacttcctcaaagaaagaggctgaacaaactttgtaataaatctcccttttaaacttgggatttcttcacccagagataactactgataacatttatatattttttcttctgattttctctttgagcttatgtattctttaatgctgttaaggtaattctgtttgtaattttgaatctagctttttccaatccatctttcttcattagccctcatccatagtttacttttaacaataataactacaaagtaacagcagtgacaataggtagtatgtagcaagtgctgcattgctgttaagaactttgcattatcttgttcactctcacaatagaataatatatattaaacctgttcacagtttgctatggcttacaacacactttcatagatattccatttgatcatgccaacaatgttgtgaaagatggcattataattcatttccctttttatgtctaaaatagattctgtctgtgctagaaaggcacattcactaaaagttatacaactagtgaatggtcctctctagccagattttaaatcctgtttccttgagctcatgccctgttgcctcccctggcatttttctgcattcaggtagactgctcagctgttctccatcatcttcatttatgcagtcctgcccctccccttgccagggactttctagacactcacagtgactatagggacaaaaagggaaggtggagaggtgcgctgaagcaatgtgctaggaatcaggggtttctacactatgatctcccaggacactcatggagtggcgatggaagtgtggcttccaagttgtcagacacagtctcttttccctcagaacctgtactgctcctcaccatggcctgccactgctaggcactctcgggcctggatattttctctcagggtcacctttttttcttcttccaatccagtttccttcagggaaacttggaatttaccctacaggagtgatattcaattatgaggtagcttcagaagatctaccggaaagcttctgattcagtgtccctgaacgttcagcaacaggagagtgtctaggctggagcaaaaagagaatctctagcggggggatacagcctaactccaccctccagcattttatcccagatatagcacaaagaccaaagattagaggtaatctgataatcttgaacaggaaggtagaggaagcagcaagaaggtagaagacttggttaggctaggtataccaaacattctgtattacttcctattttaaaaaaattctttgggtgggataataagagatactgtaaaacgtggatcacatactataatgaccttcattcattttgtaagcagttggcttggttcagaaatgtgcttgccaataataagttgcaggtaaggaaactagtaagtgacagaactgggacctaaaccaggtgatctgggtgtggcttgagtggacgtgggcagccagtcacccatggaacacagagtatggacctgacatcattatgtgtggaagttcagagattgcatggtccactagctcaggaacaggtttcatttgtctttgaatccctagcatgtaagttaaacaaactgcagatatattattagggtcaacatgaggaaaattctgcattacagcccagcttatcatggactgattacttctgctgccctttagtgctgtactgtttgttttccccaggcaaaacatccaaggctgagtccacttggtgaaagattaccaaatcttgtactgaaaggaaatactacatttcccctgtaaatagtaatggaactgactaaataagcccaacttatatggcaaaatttttcaaattcttgaatcaggctgaggtaaatggagttaaaagattaggattttatttttgtttccagagtaacttgtttatactcatgctgtttctttatctattatatttctagtcttcaagtgccattatttcttacaaatcatatgtaaatttataatgatattgttataatattcattaattaaaactcactagcaagattaaagccaatttcttaatgcaatttatagtgttaacaaagatttcagaaactgaaccccaattatttacatagatgatattttgatgttgtaaatatttatgacccatgggtcactgaagatataaattaatttcccatcagttaagaccagcagtttaaggcaaatgaaaaacattttcaaaacaggaatttattgtatttttaataatagctcaactttattgctaacctcgttactggcaagaacttgagagacaaaatcaaatttgggtttctttctaaaattttttaaagttactgggaaacatagtctgtttaatttctcatatgatacacaaaggggaaaaaaactattctaggatgtagtcccagtcgtaatggtgagtcattggctgcagcagtcataatgatagaggattctatttattgctgttctctaagcctcacacaatgaagccaggcagaaattatataattattcctcctggatggatcttctcattcgtttgtaattacaaaatactctttgagtacttttatatcctgaaattaagtcttcagaattgcagaaagaaccgtaaggtttgatctcaggcttgtttatcctccttatattttattttgccaattaatagtgtagcttcccaggtgctaaaatgtgacttctttatcttttgtgtggctcaattacttagactaattttaaataaatcctaagggaaacctcttattttcacaattacatggtatatttttccactgcttataacttcttcctgtatcaattaagtagcttaagttgctaatgttccatgctctctaggtgtgcctctttcaatatttcctgtccttttcgccactgctcataaatggtttctaatcattcttataattgtaccttcttggagccttgagagacaggcacaggttctcttacataggctattattgatattggttgcttttattttccctccaacccccactccagataacaactgttgagtgcgtaccatgtggcaaacaatgggaatgaagagattaatgagccctcaaagaattcatgatttacgtagcacatacttctagctaactgttctagctacaccagccagttctagagaggtacccatggaggttttggatatgtgcttaactccttgaagattcttctggaatgatgcctaaagtaattgtcaagagaagctatgctaatcttcctcttcagaatattcccatttctttcttagttataggtatgaggagtctaaaatatgctttaacatagtaagcttattgttataactggaaccatgcaaaatcttaatttcctataatataatttcttgctcctccaaagtcattcaaatattaaattggacttattctatatgttgcttagtggaaaggtatcacaaataaaaagtgggccacaatgagtaggtcaattaaataaatgcaaaatatatattgatttattaattacaatataatactgtgctaaatgcttagcttgcattatctcatttaattcttaccaaaactctttgaggtgattattgtatacactcccatttacagatgaaaaactgaggtttaaggaaaagatgtgtatgcccaaatttcttaatgactaaatggcagcagaccaggactgtcttgactccaaagaacatgttctaatactgtacagcttcagactccttcatgagagctgtgatgctcaataatatatgtcaggatatgaatacttagactcattccagaccatgtcataagccttagacctttttcatttgtgtttatagatagtgaccttttagtgcagtgacaatttcttaccacacagcaatctgcatgcaaggaattgctaatatctgctttgctcagaaggaagcttgtatgtagcattaattatggcaccattaatccattcagttatttattgaaactattatttgttgagtttctgctacatgcttggaagtttcatgtgttatctcctttaaactcactgtaaaaggcatgaggataccaattttctatatctgcagtaattttcccagggttacgtagctcctaactggatgtagtgtcttggattcagacccagctgtttgtctccgaagtctataccaaactaccctggtagtttagagcttatgtttaccagaaatttatgtcccaccagcacgtaatttttaaaccaactctgttgaggtataatttaaataaatgaaatgcacatgttttaagtgtgatacatttggtaagatttgattatgtatatacccttgtagctaccacccccactcaaattatacatttccatcactcagtaaattgctttgtgcccttttgcagtctctcttactccttgccccaggctaccattgatctgatttccatcactgtagactagtttttccaattctagaagttcatataaaaggaatagtacagtatatactcttttttgcctgattttttcacttaatgtaaagttttgtgagattcatacatgttgttgcctattcaatagttcattcttttttattaccaaataatattccattatatcacacatcacatttgtttttccatttgtctcctgatgtgtatatggttgtttctagtatggggtgatgttgaataaagctgctatgagcgttcgtatcccagttttattggctcatccactgttgtccaaaagaatttcttgaactctgcatttgtcctgaaggattctctgattgttcttcatacaagaactctaggaatataacatggaatccagctaatttctgaaactcatgtatttaattatacatttacactaacggccgtgtgcactgagaaaaatcctcctgattaatggcattgcttttagagtcagtgatcttttatttctcatgcaagtcatagtcaccactgtcagtcaggcttctcagttccaagcaactgaaaccaatcctggctcccttaaaaagtagatgaatctggccaggcatagtggctcacgcctgtaatcccagcattttgggaggtcaagccgggcagatcacgaggtcaagagattgagaccagcctgaccaacatggtgaaactctgtctttactaaaaatacaaaaattagttgggtgtggtagtgcgcgcttgtagtcccggctacttgggagactgaggcaggagaatcgcttgaacccgggaagcgtaggttgcagtgagccaagatcgcaccactgcactccagcctgggtgacagagtgagactccatctcaaaaaaaaaaaaaaaaaaaaaaaaagaaaaaggaaaaaaagaaaagaaaagaaagtagctgaatctatgaacaggggagagggtagttcatacatacaatcacaggaacctatagaacgaggtttgccaaacaggcaggagcaagaaaaactaggcagctgccaggtccacagccaaagtcatataaaaaaaatcaatctgttgcagacactgctgtcacagctactgacattagactcatcgtttctgctcctgatcataagaccatattagttatgcatgactcactttccagtacctattccatttcttttttgccttcagatggttgtgtctaagaaatttccagaagtcctcaacctgggtgggataagagtagtagaacaagagtagtgggcagcctagaggtgtggaccaaaagcacttgccttctaattatgacatcagggcttgcttaagcagttcctcctgatgacagagcacagcagggcagggtatgcctgactgtaagaagtgtaaaaagataagatgtaccattcatggacagccttgccacatggtcacctgaattccgcgtgatatgaacataatattacaaggtttatagatttaatctctcctaatactcagacactatccaggtgcaacttatttgtataaaagacatggctttctccagctaatcatattatacgttccaagtctcttctctctccttaaattctggatgagtatttcacacctttgcctctctttaaactctcaaaacctatccccactctcagctgatgatgcttctttctaatttactgagtagacagaagcaataaggactttcacagactcccagttgataggacctgcactcaaatactctactttcctgcctatagattaattatctatgctcctatctaaggcaaattaaataataatgctgtataatggagtaaatgattttggtttattaataataaaataacactctgctaagttctatgcatgcatcatctcatttaatcctctcagcattttcacgtgggtgctttaattagccctggtttataaataaactgtaacttaggggagcgaagtaacttgtctaatgttctacaactagtatttggcagcagaccaagtttgcgtaactttgaaagcttcagaaaatttttaatcccaactttatgatgttttcagtgtatcatagaacatagcattgttgatcatcaggtctttcatttcaggttacccgataagccttaatcctgcatcccagctggcggatattcttacccagtgtgaaacccaaacctttatacttggtgaatctaacccttgagaccctgaatgcatttcacaaacagagatttttcttgctttctaccaccaggcatggagtatccaaaagtactttcttttcgttccttggatacctcaatattattctctgccctctttgtgcagcagcaactatttaccaagcctatgaacaaacttggatgtggaccttagtctcctcttccaagatatatcacacaaggttcagccactgggaaactttctcttccccactgtccttcatggccaactctaggtgacctcccctatttcatgtcacagaatctgcttacagttggttccaaacctttccatcctttttctctcataacctaagtaaaggcccaatgggcctgaccctccattacttttctgacatccactttccttcttactcttttgtctttctgtacataggcatccatacttttcctcatgccatgccagcctttgctcttgctgttattctgtctgaaatgtccctcatcccaatatccacgtgaaaactccctcctcttctagcgtttgcttgaatctcacattctccaggaggcctagctttcccctcctctctcaccagaactcctgatctacactactcgttttacttttttgtaaaagtaaaagtgcttttcactttctaatatactatataatttacttaccatttaaattttattgtctttccccccaccagaatgttaactcctcgatgtcatttcttttgtgcccacaagcacctagaaaaatcctggcccatactggactctcattaaacattcaatgaactgaccctaatcttagtgacctccatcatgatatatgctccctgagatctgctatagactccatacaacccccgacatggcatcacaggacaagcacaataacaaggataaagtggaatagctgcttgtgctgcagcacaatacagcaacgagacctctcttcctctggatacccctcaaagataacagctgttcaagtcacctggccagtgagtccaaacagcacaccataatgtggtacataccgcctccaaagtctatggaggtccactctagttttgttcctcctctttctcagcagtggctcagtcaagccttcttttctttttcttttttttccccagttaggttcttcccatttattttgtctccagagactctatgattaattagccaatatttctttatgtgtcattaaactcttaaaggaagactcctttctaaggaagctgtaggaatctcctggagatgatattacagtggcataatgtgaataattgtctcaagaaagaaccaagataccttgactttcttcttctttagagtgtttttgctcccttcagagagaatacctttttaggtattttctttcagactttatggtgaaaattattagtcttaaaatccttttcaagatttaccttaagatgcctattaagtacaaagaatatctttggtgcccagacctgatatccaggtgttccatggaatatcttgatccctagatctttgctacatacctatagcatttctgtctttatagcaatgtaaactaagcactataatcacttttactgcaaaatcgtaggctacatagagtctcttgaactgccttaacacagtttctgcatttttttacttttaggatttcctctctgaaacctgaatatgtaagcaatcaccagctgtatatattaaagccattgttttttctacttgatggagaccacgtgtatggctggatgaccctgtgttaaactgcatttggaccattgctcttgaccatatatttattttcacttagaattttagattgtttgtggattttggctccagtatagatttagtgctctactttttcattcatgcagtttttcatcacattgcccctgaatgattttttggaagtggaaatatgattacctgattatctcattcataactacataaaatctttctatgttctcccatcactttcaggagaagagtttgaattaattagcatgaccaaacgcttctttataatctagtactgtttatctttccaaacttttctgccagccatacaggtgcctacagtaaaaaataatatttttgtatcaaaaagatgagacatcaggccaaacatacctgtggcaagaaacacactatgatcttgggcatgtgatgatgaaggctaagcaacatcccatttttctcaagtgaaaaactatctttgaatcttggttcttgaaatgtctactagctccaaaagtggaacaagcattttctacaggaaactgtacatctgggattagtactatttagactttaaatgaagaaaagcctctgtttaagcaaaaggaaagatcaaaagtattctcagatcttttattcattcattactttcccttctggcttttttttccctgtaactttgagagatttttgaagaggaagaaggcagtaaggtcagaataaggcacacacaagggagttggaggtgaattcttgttttctcagcacttgctcttggttaggtattgggctgagggattgcacatatattattgcatcaattctatgatacacattgcttttatattttaatatctcagaagtatgtgttgaaatcaatagtattttagatttgatgaaatatgccttgcttgatctgaacaccaactttattaacaaatttatttatttttatttttttaacattaactttattttacagattaagaatctgtagatcagagagattatttgccctgtgtcacaagtggtagaaccagaattcaagcagaggtctgaattactccaaaacccattaacaaattgtagacattactttagatttgggataaatacctaatgtttattatgacaaattcaggatccaaaataatcttgactggcaacagcagcctgagacaaactaaataaaactgaaagtgatcccctctcatatcatgaccttgttggaagaagtaaatagcaatgagagagtcaggaattagacagaagtagaacaggtactggagtgtggtaggggttaaaaagtgaagagcagtgggtaaagatgagagaaaaaagtctagactctagaaataggcagtagaaacttgctatgacaggtgagggaaagtttagtatgaggtaatggggtgttttgacaggcagacagagcccaggaggtgcaaagctcagcacaggaagtacaaaaagatgcaacagaatgcctcagaaatctctttcaacagctagcaggtcataggcaacaagccaatgggaaggttttagcattagccaatgctagcaaatattttcactgtagaagcatatagttttgaaagtcagtgaagaacatcattttttctaagatggttcataggtcaaaatcctaggcctgggagatgctagaaggtgataagagaaccagcagtaacataatgccaagatgttagatgttagatgttgatgttagaactcctagtttgtagctatgctatactagaaaaggaagaagagtgcttcagtagctcctatgactccacaagagggtaaacatacaatattacagaggagggaggagttgtaagctggccatgttactgctggtcaagtaacataatattctaccctcagctgtacaagggcttagattcctttggggatggaagagcaatatgatggcttctttctgcaggaggcttcagagacaggagattgagtcaaagctgaacatgcccccaggtaaagcaatgccccatccacatggaggccatgaaccagagagaggccagggagaactcttctggaccaatgagtgaacagttacctaagtatatctctgcctcccctattctttctggagttaggccttgaaaggagagctaaagggatgatacatccccagactctgtccccatctcacaaggggctacactggcaggatgagtaaaagagcaaaggccaaatgttgagccagtggtgaggggaagcatgacatttggtatgagattggagttttaaagtggcatggaatgtagttccaaaactgaaagtgcttgcaaagtcatgggatttgcctgggatgttattgaaatgtaacagcaaagggaaactcaaaaaccatgtgaggtttgattttatgtgtcaattgactggaccactgggtgcccagatatttggttaaacattattttgggtgtgtcggtgagggtatttctgattgaaataccctctattttattttttaaaataaataacataattatgtatataatataatataaataatttttatttattttaaaatatcctatctatttcaattgataggttaagtaaagcagtttgccctcctcaatgtgcatgggcctcatttcctgttggttctgtttctctgtagaactcctgatgaatacagtatatttgaagaaagcaattcaaaaaataaaaagtcgttcttaatttatccccaacagagttgagattttgcaataaactggttacagttttgttataaagaggtattagagtactcagttgtgaatgttcaactacacctctgaatttcctgcatcacttttgtggactcattttcagtagacctagccaaacagtctttaaatgaacatattatatgttacttttgtcaaaagcacatcatattattagacaaagcaatgcaatttggccatgagactgctctcttaagacacctctgaaagtgtctcaaagcatagtcagctattagctaggaacagaatttcacatatttacttccaaactagccagtgcatggtgtgcaagagaataatggaaaagagatgcagaaacaactcgtttcaggcacagggaaggggaggctggttggaaaagaaagcagtcttaatagcacagtcattaatttgccaaattcttttctggacttgactgtgactctctgggtagtgtgttatcaatttcagcctcattacctatgcacagcaagggaaactgaggacaaatcatgtccctagacttcagcctgttataaattcccttgcatttgagatcaaataaagcctcgaacttaaattactctcttcttacatcatcatgtctgcttcatttgctccaagtttattctcccagcataaaaaataaggaaagtcattaagtacaagaagggaaatggagtggtttgtagtggtgtcagcttcccctctccagatcctctcccaagtgtgtcattagcctcagatgaaggccatctgaggctattatacttagtcattgtgtgtttaccccagcattgtagctgtcattggctaggcaagaaaaaaaagtacatctggctgggattgtaaatgacacttgataaaggtattcacagaagtgtaggcaaggatattgagatgcgcaatgactagcaacagtgggaagtggtcactactgctaggcctgaagaagcaggaggaagaaatgattaatgtggcataaaatgcagcagccacaagagctgcagtgtcaagcaggaaggagcaagaagagaggtgcactgccatctttctccttctgcctgtctgtctctttttgatgtctcctgttggctgaactcgaccaaaagtcaaagggcaaaggaacccatggtcagtcccttaggtcacaaagatggaaaatggattggagggtggggatagggagaggcaaatggagaataattagctcagttgttttgcatatttgtatgatttgtttaattatttttattagttttgtatttagtaaaagaaaatttatttatccatcaaggcctaggttctgttgcgcaattattatttattatctactgacattcctggtactgcaactgtatctgggatctttcaaacaatatttcaatatattatgctttaagtttagggagaagagacatgcacatacaaaaagtggggctggaaaagtagcttgagacgagatcattgagaacttttactggctggtgagaattttgataggcagtaagaagacattgaaggatgttgaggaagggagtgttttacttagaaatgtgttatagaaagattaagctgacaacattatagcagatgatttgatggaggagaaattgaaggcagggaaaactggggaatcagcattagcctggtaattgattatccttccaacacctctgtaaagctgttgggtgcaaattgttagtggtttactatctagtgcatgggaactgcaggaagattcaatgcactccaaaatagtagcttctaactaccaaattaaggacaaggaggaagctaggttacagtagcttctaactaccaatttaaggacaaggagaagctaggtacttcctaagtgatgtcggccgatatctcaaatgcagtgacagagagggcctcatgtcatgaagtccaaggacagtgtcattagggcaggaatttactggcctccatgagtgggaaatgaaagtggtccaaggtgttcactgtgaaacaaaccccaaagttacacaatctctttctaaactgtttggaaagtacaaagaagggaggtagggagatgactccagccatgctttgggctcagtgattactgctgtttctgctgacagctcgtctctcatggagatgagccatatccttaatgatctcatttcattctgttttccaaaaagttatactcctcctagataatcaatccttttcaatatcagtgctcaccagccacccccagcccagaagatgttaatctttccatgacccctctgggacctctttcccacccttcagaaatgctatgatcttggaagaaatctgctgttagatccttgtacatatgctattctaccactagactacagttcctgagagcagagatgatatttattcattttagcactcttaacacttattacaaggcctagcattcgatagagttaaatacattttggttggatggttgcatccagctacagatggatagctgtagctatctttaaaaaagctgttttattgggttttaattgtgggatttaattatgttttgtttatagaaaaaaatcatgttctcatcgcatttactaatctgcattatttctgccaacagtatttgatagcatcagtgttcctgtcttctcagtttgaataaataaagtcaagttaccactcacttagggtatataaatatgtaggggtcccattctcacatggttctactataatggagagcttagccatgtatggcttctcaaatacaggctcaataaagataagtaactcaaaatttttctaatatgatttctcctggaacatggtgcagtggcgagggcaacatgatggcaggggttagtggcagtataggtagacatgtaatgcatgataatgtgaaggtggcatgtttctcattcagctctgttggctgctactaagaattcattgcttttactttgtgccatagaagtttcacagaggttgaaacttattagtaaatcatcacagagagcaactttatagttgatacaaatcaccttgcacattacagcattttcttacattgtggtttcagttgtgaagatgtgctatctgtttccattctgcctgtggtgttagagaacaagtcatgggaaaagttgaaatccaaagaaatgtgcaaagcacaacattatcccttcctgttgttcctggtctctacctttggattctgcaccatgtttttatgctgaaaggtgttttaatcatggctgggttgggcaatgacatgtgaagaggtgtcacttcacctggccaacacagagttcaaattatccaaataaaactactaattgggatcttcagatcaaacactgtcaagaagactattattgaggaaggattctgcatgacctttcagagaaacaagatcaaagagtagggatgaagatgagccacattgttaacaataaaattagagagcaggaactcagcaggacttgtagttaccacatctgtaagggagttagaaatgaagcagcagagacaacatactgtgtacaattctggaaacatttatcatttctccagtttattatttttatgatttcttgacagtttttctatagtgattagtatgacaatgtataaaactagaagggcctgccaatttaccctccaaggcaacaaggaattaagggcaagaggaaaatttccaagagctggaaaaagctacttaattacaggacaaactaagtaaaaggaaagaagagggaagtatctggaggcttggaggtgatctggggctgagcagccaaaaagttcacaagattggatgtttcacttgctattgggaagaagagaggagtagctgataagaagaatgctctttgatcccctctacttcaaagcattatggatctagattaatattcagtacttctttactcaggtacttttctttaagcttcacctcccttccattagagcgagaaaacattttgtagtttctaaattgtctcttcataagttccaagggataaagtgggagacattcaggagcctggtacattagcatcctcttaatgcagtatgaagttgaggggcttttaatgtggatatcaaaactgattattgaaattgcaaagaagccttgtatgctgcttgcaagctgagatggatgatgacagtggagccttttgcattataaattagaatggctcctccctttttaagtcattgctcttttaggttgctaatttatctttttatctgtgatttatccttccttgctcacattcttaaacgtttttccctctgctgctatgttttaatagcatagacttggatttactgtgactgatttggcaaatttcaagctttagaaaggtgccttaaaactgttgctgagagctttctggagatgggtaataacattgattggaattgatagtctcttgaacaagagaagttgaaaatgttgccagggctccaaggaatgacataaagttgatatctgtcatttatttgtccaatcaagacttggctatttctgtctaaagtagtaaacagacatattatttttactgctattaaaagtagcagtagcaataacaatatttatataacatatattaatatttcagttaggattttttatttcataccacataaattatctttgataaacttaaacaaaggagaatttattgaaaagattttgggagcacctacaatcattgcaaacctggagagccagccctagaaataggcaagaaccaaggcagccctagagagaaaaagcaggacccttcagagaggcttcctaaccaaaaccattggaaagtggccaccctcctaggataaagagaaattccagccatttctagcctctttgccctttagttgggatttaaattccacagatagggcatcttgtttgacctacctcggatcacatgcaagccccttgtttaggttgtgtagaccccctgattatttattatgtcagcagactttatgtaataggaaagacaattgctcaagggcatagagagatattgttaaaaatgggaattgaatgcccagcaaccaaaaaaataaatccatggtactttactttttataaaaaatgtaaaacatattcaacttaacctttgcagcaacactctgaaatatacaggcagtattaaaactgtgttatagattaggtaatttaggattaaacatatcaggtaaattctcccaaatcacatagtaattcagtgacagaataatattcaaaaccaagtgtcctcattatatattttatgtttttctttgctttctttcctattctttggggctttgatacacaaacagataagatcattgaggaacttcagttccaaaatattttctccttttatccctctggccctcccaccctctgtcatcactccttgtatctttctttgttccctttggctaatattattgaaagcttattgaatcctcttcccttaattaatttgaaaagatgaacttcaggtactgagtgtattgactttttttttttatctccatgtctgtattaattaggatgagttttggctgaatatgctggaaatcctaaaataacagttgtttaaacagaaaaaggtctattatcccacataaaagccaaggaaagccaggtctggtgtggctgggtcatcagtaacccagcctcctctgtctttttgttctaccatattagctctggcttccaatttccaagtctttttagaagttatcatgacggctggagggccagccatctggccagatgttacagattggagtaaggagtaaaagcagaaaggcaaatgagggttttctctcgctgtacgtggtcttcctaaaacatcttagagtttcttcccaacaacttctgcttatatttcattggccaggacttaatcacatggctacactagttcaagggtaaatgtaatatctctttctgaactaaggttgcttgcctttaatgacaatatttaattcttggtattgttgtgaggattaaatgaggtaatgtgtgtgcattttctaacaaaagggtttggtaaataataagcacctagtaaaagttgattcctttctactatcttcctgaggcctagcgttcagagcacccatgcagcctccagttgttcatttcccattgctttttgtagaatcttatggtctaaaggagaagataaaagttttaaactcagttaggacttcatccaaatgttaacaattatgctgactagctgtatcatcttgagcaaattattcaacctctctgatcattcgtttcctcattgttcaatgtgaataatattataaaacctatcttgtgaattgttgtaagaatgatatgatatatgtaaaaatatgctcccagtttagttcctgacataagaatagacgctcaagaaatgtgagttgttcctctagccctctctccatcacaaagatttgcagtcacttattagtaaaagcctttctccttgggaaaagaaaaattggcatcttaatggcttttcattattttttataaagaagaataaagtaaatgaataataaaagataatttaaatagttttgtttttctgcttgtgaactcagaatacttcaaatatgatagttcctcattattattttttaacgaaacgttaactctagtgtatatccattgagtgttcacacaatgtgtgccaggtgtgttccagatcatagaaattcagcaataagcaaaaaccgacaaggtttctttctttcctgaaacacattttagaggcacaaataaatgaatacataaataatatagtttcaggtagtgatgcatgtggtgaagaaaaatgcacaggaaaacgagatagagaaggatggctagtgtcatgtcagataagattctcagacagaacaccctcaaggaggtgatgtctgaactccctgcccaccacaacaaacagcctacaggaccttaaggaaaaggctgtatttaggttgattactcagtttccctgagaggccatcagaactagctccaacttgcttcatattcaattttccctcagttatcctcagtagtccaagcctcccataatcattttagtattttgctccataaggcttgacacatttcctaagataaatgaatcttccctaacctttccacagtgctgctgaaattctgaatctggaaatcatggagatttcctccatccctagactcctagctgattgttccctttccttgctccaactgacacctggctctcccttggcctctgagctacacttgcagtgttcttttttcattcccccccagccccacattcaatgcactgcagtgcatagagaaagaggagggccctccacttagagatcattttattccctacctttctcaaaaaccttgcttttttgaagtgcatgccatcagactatacacctgctacccttctttgatgtagtcagccacagatttctggatcacaccctcgaattcactgaatattgcagcatctgactcactctttgtctccgtgacaaatggtggcatcatttgtgataacttctacgtgcatgtagatgatgcattcaataccctggtcttatagttatttgctatcattttgaataaccttttcttccacatcaactaagccatctcctctcccatgtttaccttacaccttttagcttaccagtaactcaactgtctccaaaatcttgatgtcaagcatttccacttgatgcctgactcttacttcccatctttccagcgcatctctttccactgcttagatttctactccattacgacttccagctcatagactctgccacttctcgctgctccccattcccctcaacccctctcacacacattctccacttctttctttgccaagcttaaatgtaagtatttgtcattaaaattactccttcctaaacacacttaggtgcccaccaaaattctgggcaaaatttcggagctggtcagatcaattcttgcctacccagaattggctcaagtgcagcaaaaaatggctggagaaaaatagtcaagcagccgggcacagtggctcacacgtgtaatcccagaactttgggaggccgaggcaggtggatcatctgaggtcaggagttcaagaccagcctgggcaacatagtgaaaccccgtctctactaaaactaaaaaacttacgtgggcactgtggcgtgtgcctgtaatcccagctactcaggaggctgaggcaggagaattacttgagcttgggaggcagaggttgcagtgagccgagattgtgccattgcactccatcctggcagcagatcaagactctgcctcaaaaataataataataataatagtcaagcaaacaactcgagctcattctaaactaatgaccacaaatctcagatgagctgtcaatgttactctgcaattttattgcaaattctggtcaagtcactctcttagtctccagaacaactattttatgtcatctcatctctacttaaacctccaaaactatgcccgtctgtcgcattcttactgagaaaatagaagaaatcacaagagagctaatttatctgtcaccgaatctaccaatgtgttctgccttttctttggacacaattcatgaaccatatccagcatttccactgtactctggacaccacttcaccttggctcctcgaggactttgcacctgcatctgtctcctccctcaccttgatcatcaatttctctctctctctcaaacataaaaacatgacattaaagaagcctacatgggctctgcaacctcctccagttactgtgtcatgtctggcctctgcttcacagtcaagctcttttaaaagttgtttttattttctcaccccccgttctcacctcaactcacttcagccaggcttgggtctgctacgcccaaatggaaactacattctcaatattctcacttttgccaaaactcatggcacaatatcaatcctcattttactcttctcagtcgataatatttctaagaattcctgcgtttttgaagtgaactcagatatttttccacatattttataatgggagtctttgagagatatgagctccttgaccttcattaagtagatttgaatggaattcaatgaaggtctgtttctccctaggcacaggtataccagctcccatggcatttctcctgatgggctctagagcaagacgtcttatgcacagttccagccagaattcaactagatttgggctctagaaattctaaactgaatacctgggcccagtaaccagggcagggatatttgatgtttaatccagctgtgaaatctttttaaaatcaccctgtgtttaactttgtaaattatactgttctttgagtctcctgttttattttgttttcctggttattggcatttccaatttcttatttttgtttatttgcttaatggattagtaactcatcaataaattcccccttgggagaagtaacacattcattgtatgtgtcatgtttgtcttaaagaaagcctagctcattggattatttcttctgttggtgcaaacactacagacctagggcaaacacttgcttatgtgcatactgaaattcattgtcattctgcttctgtatcttcaggtcctaagccttgtggaattggtgtgagggtcaggaagtgaagttgtgcagtgcaggaattagaaattccaacagaccttttgatttgtctagcaaaatgcttttaatttttttaacttaattttttaaagctgagcatgcattcagttcaccaagaccccaacaatcactttttattatctttctatctcttgtctgaccagttttatttaaaatatctttgttgagggtcttctacaggtcaggcactgtactaggctctagagatattgcaggaacaagatagcaaggtcccaaatctcatgaagcctgcatttaatggagagatactgattaaaaatgaagcaacaaataaacaaacaagaacattccaaataatgagaaatgcaattaagttaatagaataagatgatgtggtgtgaaaagtgtgcagaaggaggtgtaactatagattgactagaccagaaaaccctcctgaggagctggcatttgctctgaggaatcaataatatgaaggagccactttgtgaagaatcagggagaggatgctaagcagagccaacagcaaggtcaaagagcctgtggcaaggaaagtttggtttgttgcaagaaaagaacagtcagtgcaaaatagaagcaagaaggaaaattgtataaaatgagatcggaaagcagagagcagattgtggaaattcttataggctatcgtaaggattttggattttattttaaatgtgatggacagctatggaagattttaaagcatgatctagtttatagtttttaaagtttactctgattactgtgggtaaaatagtttatagaatcaaagaatggaaacaagaagatcaatgactgttgaaaaaaatcctcataacagataatgatagcttgagtgaggtttggaactattaaagtgaacagaattacaaggataggacagacattggaaatagagccaacaggacttgctgatgtattaaatgcatctcgtgaaggaaagagaggaatcaaggacaattccagattttgggcttgagcaacaggctagacaagagtgtcattgattgagaagggaaggactgaatgagcaacagacttagttgggaaaagaaataattctgtttcggccatgtggcgtctaagatgcatacgagacatccatgtgtaaagttgtgtaggcactggatatatgagtcactgcatccatttacattacccctaagggcttctaagtttgtgtctttggtacagaccataggttaagaacactggttcaggagtaaaaagatctttgcttgaatccagtttttgatgcttaacagctctgtgaccttgagcaaaattcttaagttatctagacctcaggatccctatctatataatcaggttaaaatattatgtacctcataaattgattgtgaagattaaataatgatatatgcaaagtgctaaacaaagtgtccagaaaaatataaatatacaatatatattagggattatttattgaacatctactctgagatatgccttttgtatatattacttcacctagccctcccacattcctaacatcagctctcccagctaaatatcactctacaggagactgagaacagattgatacaaacacagatttattttttcacttttcaaagaaaatgtacatacctgcatggactacccctgacttaccaacataggtagcatttctaagaagctgaaatggttagctctacactgaaatccacatttttatggatatgcctatttcatatctcttctttgatgtctgtcatttcaaacttgacatgatctgatctctaccccaaacccaaatcttctgctgacttcctcatcttagttgaggacatctcgggccttttgattgcccaggtataacaccctgtaatcatcatcagtccttgtctttctcacacatgctttatgaaagctttgtatgaaatggcttcatggtaccccactctcatttcctgctactcaccccctcactcactttgctccagccacactggcctacttgctgttattcaaatacactaggcatgctcttgcttttgcacttgctgtttccttagcctgacacccaaatatcctagacattcccccagacatctgtcttgttaacctgaccacctgttcaaaattaaatctctcctggcactatttcccttcccttcctttaccccggctcattcggagagacactatactctctgaagccagtttctctggagtcaattcttctatcagtaaagatccattggtcctctgcctgctgactcagccccatgacatgcattagggttgtctctagctgcaatataagaaatcatgcaactttgggaggccaaggcgggcggatcacgaggtcaggagatcaagaccatcctggctaacacagtgaaaccccatctctactaaaaatacaaaaaattagccagacatggtggtgggcgcctgtagtcccagctattcaggaggctgaggcaggagaatggcatgaacccgggaggcggagcttgcagtgagctgagctgagatcgcgccactgcactccagcctgggcgacagagcaagactccgttaaaaaaaaaaaaaaaaacatgctatagtgactaaacagggctttatttgtctcatgcaacaagaagttcaagggtagatagtctaaggcctgacacgactcagtgtgtcaccaaagattcggaatcctcttatcttctttttctaccatccttgtgcttatcctcaaagccatactattgctactgattttttatgagttccctatttcaggcagaaaaaacgaggaaagggtaaaaagcaaaagataaagagttctcctatgttgtaaagtctgtcttctatagtctgcactgcctgaaattgcttatttttcagctatttttaacctataaaatggcaatttcataaggtctgacctaatattggggaaggaacatcttccccagaggcttttttttgagatggagtcttgctctgtcgcccaggctggagtgcagtggctcgatattggctcactgctagctctgcctcctgggttcacgccattctcctgcctcaggctcctgagtagctaggattacaggcgcccaccaccatgcccggctaattttttttgtatttttagcagagatggggtttcaccgtgttagccaggatggtcttgatctcctgacctcgtgatccgcccgcctcggcctcccaaagtgctgggattacaggcgtgagccaccatgcccggccccccagaggcttctacctgcatctcattggccagaactatgccacttggacactctcagcctcaggcagagcaggacataaagattgtgtgagcctttaaggcagccacttcagtgtttgccatccacaattttgttcgttttgagttaccaatcttccatgaacttattcagcttcctggctttgagccatccccctcagagcctctgttacaaggcagccaccactgtttcatagacatgggggttcataactcttcactaaatccctactccacacctcagcacatgagaacttttgggtctcttatgtgatatctacagattttgaggaattacatttcagagactggggcagtaatgatagaatctcgggccttctgtctaaataaaccatactgtcatttccattctaccacattatcctgtgctcgtgtggctaaaaaaaaaaccctgcagagctgaacttctaaatctttatacatattatttaatctaatcctcacagcaagcttttagctctctcttctattgctattttatacacgaggaaactaaatctcagagaggttaaatccaaggccctttagctagcaaatgacagagcttctattcaaactcaggtctgcctcaagccaaagcctcgtcctgatccatttcattaaattactaccaagtattacagatctttcctagggcaatcattttcttctatataggactcctggagtcactctgagtatttctaatgaggctgacaacaaagggaagcttggaagtttctaagcagtcacttccacagagttgcttaatttgccctaattcctggtttttgcagcccctgtcctaggctcttgctcacatatggacttgaatttgtggaaaggtcaaaaatgatattctagatggagagatagtcttggagtacaaagaacataagcagaaatgagtaaataaagctctaggagagcgtgtgatccagctcaattaaaggttagataagccatggtggcacataagctttgaaggtagagttcaaatcataccattaggattttgactgccaggcagaagagtttgatctttcttctgttggcaatgatgatgtattggaggttttgacacaggagagttaaattatactttgtgtttacaactttaaaaaatcaaaaaatttaaaaattgccttgaatgcaaagcaaacataataatcctaccatagggattccaaggcaaatttgaaagttttgtgacattttctgttatcatttctgttttccaagatagcaatgagatttaatttgcgcatcacaaagaccgttagcctttaaacagacaaaacagaaaattcttacgtctaaattcaatttttgttgtaagaacaaaagttgctcctactaacgttaaataacaaatgaccggaagcatcttgcaattcaatgttaaaatagttcctgaccaggtgcagtgtggctcacgcctgtaatcccagcactttgggaaaccaaggagggcagatcacgaggtcaggagtttgagaccagcctggccaacatggtgaaaccctgcttccactcaaaatacaaaaattagcggggcacagtggcatgtgctactcaggaggctgagggccagagaattgcttgaacccaggaggcggaggttgcagtgagccgagattgcaccactgcactccagcctgggtgacagagcgagaatctgtctaaaaaaaaaaaaaaaaaaaattcctaaattgtaaaaccagcatggcaaacgaaatgaatattatggcttccttgtctagagtagaatggtcatgattcagaatataattttttaaaacatattgaagaatattgaataatttaagtgactcattaataacattgagaagctacatgcaataaactcagctagaccatttaaggtactggtttttatttgtccaagtaatgtcacattattgaggtggcacagaaaacagtaatccatctgtgagtcagaaatatgtgagtcagcaacactgtgtgaagagccctctgtccttttgattactcaaactgatgttttgattcaactgagtaatttaccagtaagttaagataattgagtattaaaaaggaaatccatgttgagagaattggttgtgaaaagatgaagtgaggaaatggagttattgacagagctgagaagtattcagggatgtctgtatcaaataaatcaacccttcaaatgacttgttttactgttggtgattgagtgagtccaaggacaggcttctaagagaagcagttaaaagaaatgctttgcaaatgtgtttcctcaaatacttaaatttgaaggcagtaactattcaaaggatggatttgcaaaatagcaatgccttctttaaaaacaggtgtttaaattggtattgatatctgaagaggaaaatgaactcacattggttaaaaagtaaagacttctctattcacttcaaaacactggtcttatttccctcttttgaaaggcttcctatggaaagaaaaatcaaagcctatcacggtgattcaggagttttatactccatgtgtgggtcaagtgtgagtgaggtaaaggattgtgacagttcctcaaggatactgtcatagtgaggccatctcccaaacctgactggttccaccttaatttggctttggggaatgaaattggggactgtccagcccgatgaagggcaagctaagacctgctcataggcatttggtttaaattacaagaagattaaatttctaaaaataatggcaaagaacagcaaagcctggagactgagctttaatagaatcatcataccatttatttttggaatgttgacgtttctgaaactcctcagatgcaagatcaatgctaagtagttttatagaaattggatgcattttccataagattaccagcagagcagagggcagtgatatgcaaaagcagtgcagagacagtgcctcaaatacactgcaaagctctgtccgggcgcctctcctgaagcacctggcatcagcactacattttcagacctttatctgttaaaatgtttttttgcccttttggggatatacagtgtgctagccttgttgtctagctgcattggtcattcatcatagtttttctgtagttctcattgttttaaacacattagggaaggattggtaaatagatagtattctatatcatgataaaagcttgataaaatcacctaggaaatcggtgtagaaaaagaaaagagcgtaaagctgagcccaggggccctccaacatttagaattggaaaaaaagttagagtttggaaaaagacctaggaagccaagaatataggagaaaaaccaggacaagacataccttgaaagtcaaatgaaggataacttgggtcaaatattcctgatatttgagaaagatagtgactaagaattgaccattggtttggacaagacgtaggccactgatgatcttgaccagagggatttattatgaagtgttgcgggccaaatcctgattctagtgtgttgagaagaaaataagtgttaaggaaatggagacagcaataaagacaacttgttagaaagttttgtttaaaaagaattgccggaaaatgaggcaatggatgcaggggtgcatggaataaccacaagtctttttaaaacacgtatttataaggtacaaatgacatgccaaaaatgcacttcttaaagtgtacaattcagacacatatacatttatgaagctatcattacattgaagataataaatatagccatcaaacccaaaagtttccctttgcaacccctcccacctctccctgacaccacccctttccccccaggaaactacctatcttctttctgtcaccatagattgattttattttctagaattctatataaatggaattatacattatgtactctatttatcagacttatttcactcagcataattagtttaggattcatccatgttacggcagttgtcagtagtgcattcttatttattgctaagtggtattccactgtatgggtatatcacaatttgtttatccattcacctgttacatttggattgtttccagttttttttttactatgccaatgctacaatgaatattctgcatagactattatatcatctattaataaaaatcattttatgtcttccttttcagtgtatttgctttgatatcattgtctttccttattgcactgggtaaaacctccagtaaaatgttgagtagaagcggaaagaacaggcattcgtacctggttcctaattttatagagaaataattcagtcttttatcttaaaggataatgtcagctgaaagttttcacagatgccgtttacctggttgatatgtaaatatatgtgtgtgtgtgtgtgtgtataaaggatggatgttgaactttatcaaatgcttttttcttcacctaattatgtgattacatgtatgttggtttgtttttcagtctgttagcatggagaactacattgatttttttttgtctgttataacaaccttgtattccttggatacaccctacttaatcataaggtgtcatcctcttcatatgttattagatttgatttgatataattntgttaagaattgttccatgtgtgtttatggtgatattattcttttgggtgattgtctttgatttttatatgggagaaaccctgaccttatacagtgagttgagaaatattccctcctcttcaattttctaaaatgatgtgtagagtcagtataattttttaaatatttcgggcagaagtcaccagtgaagttatctgggcatgcagttttctttatggaaatgttttaaactttaaaattcaatttctgtaatagatacagacctattcacattatttctttcttcttgagtgaattttgatagatggtgttttacaaggaattcgtccacttcattgaagttgtcaaatgtactggcataattattattattatttttgagacggagtcttgctctgtcgccaagactggagtgcaatggcaggatgttggctcactgcaacctctgcctcccgggttcaagtgattctcccgcttcagcctcccatgtagctgggactacaggtgcatgccactatatctagctaatttttgtgtttttagtagagacagggtttcactatgttagccaggctggtctcaaacgcctgacctcaggtgatccgcctggctcagccttccaaagtgctgggattacaggcatgagccaccgtgcccagcctggtataattttttttatgattctttattatttttatagtatctttagagtctatcctgttatctcctctctcattctttcagtaacttgtatctcttctttttttttcctggtaagtctgactagaggtttgtcaattttattgattactcaaaacctgttttggcttcactgatctctctctccctctctcttttatttccgctctatctttattttttcccttctgcttcctttgtgatttatttgctttttcttgagctagaaacggaagtcattttttctatttttttaataaaggtattttagagctgtagatttccctgaacatgctgctttagctgcatcctacaaattttaacatataatgttttcgttgtcattcagttcaaaatacttttctcttttcattgtatctttagctcatgagttgtttagactgtatttagtttacaaatgcctggggctttaccaaaaatctttctggttttgatttctagtttaattccgctctgatcagaagacaaactttgtatgacttcaaatttttttgatgttttgagacttgttttatagactagaacgtcagctattttggtgacgtttcacgtgcacttgaaaaaatgtctatctttgtcaattagttaaattgatgatgttgttcaagtcttctatatccttactgggtttctgtctatttgttccatcaattattgaggctataattgtgtagttttctatttcttttttcagttttatcaatttttgccttatgtagtttgaaactctattaataggtacagaaatatttagaattgttatattctcaagaactgactcttttatcattatgaaatcatcctttttattcctggtaatattcttaactctggaatctacttattcttttattaatatagacattctagatttctgatgattagtgttatcatagtttatcttttttcattcttttccttttaacctatttgtgtctttatatttaaagtgatctattataagccacatgtagtcaggtcatgcttttttaatccatcttgaaaatgtcttccttttaaatgtgatgtttagaccatttacatttgaaggtaatattgccatggtcaggcttaaatctaccatgttgctatttgttttctatttgtcttatccattctgttgaaaaaaaatgtttagacaagttaaatttaacagagtttaactgagcaaaggattttttcagaatcgggcagccctcagatcagaacaggttcagagagcagcattccacagtatgggcagcagcatttattaatagaaaacagtaatgtacagaaacagcttgattagcatgattacttggccatccaaaattgaagcttggctgctgtgattggctgagctcagctatttgttacataagtataagcctaagttaagctttcagttaatttatatcgtaaaaagtacagaggaagtttcaggctaaatttagcggttcattatatgctttttcctctttttcttctcttttttggatagttgttttatgcttccatttcctttgttagcttattatatatatctcttcatttttaaaattttaatagttactttaggatttagagtataaatttttagtttatcacagtctaccttcaagcaatattttaccgctttatctagctgtaagaatcttcagaatacccttctatttcccccttctttgcctttgtactcttgtcatatagtttacttctacatatgtcatgaacttcacagtagattgttattatgtgtgcttttcaatcacttatcttttaaagagattttaataagaagaaaaaaaatgtttattcctttgtatagaaccagatttccatctggtatcattttccttctgcttgaaggatttcctttaacatttcttgtactttgggtttgctggagatgatgaattccttcaactttcatatgtttgatgaaaatctttttactagttattttttgtttgtgggtttgtttgtttttgatacaaaactttacagcttgattgtttgctcatgcaaaatacaaaacgatgatgcaggagagagtaaatgtatgcagaagggtagaccatgagtaggtgagggaggacagggttcaggacagaggagttggcttctgataaaatcacagaaatgtatccatagcagcaagaagaaagacagaacagttgtttacacgtgtgagttgattgattcattaatggatccaaccaaactggttttaaatccacgatgtaccatttaatagctaagtggttgtcagcaagttatttaagccttttaaatttgaattttcacgtctataaaaacaagttccttccttcctcagaaggtgattagagcaatgaaatgaggtaatatataccaaatgtacagcacatgacctggcacattgtgcccactcaatacctgtgagaaaaaaatatatagcttttctatgctttactgcctaagtacaagtggaaagattctgaaatatcatttttccacttctactttctctgcttccctttctctcacccctcctcccttcccaaaagaacatatttaaaatccaaatgccaggctgtctgcaggtgcagtgttcaagactgataacatttggaggccagatgttaactgacataaacactattaagtgctatgtagaccggaggctgaggcattgatttccaattttatgattattatttgaatttacagcaaaccataatgccattccttccacgtctctacctccaccaaaaagacaatatatggcctattcattttcaagagaatataaattgtttttaaaaatatgaagttcttgaaatattaagttatgctgtttcacaaacctggaactgaaaatgcacccttgatgtgcacctcaacacctccctagagctctgcttgaaaggtcaaagacttgtgaaatttgatctgaaaaccagtctcattttctgaaataaatgcagagtaataacgacaaaaatgcttcaaacctgggacaagtttttacatcaacttatgttttaaatctcagtttccttagacttgatgtgggagctggcccaatgacaataaataaatatcctttctctgagtaaagaaatactttgtaaaaacaagttgggtctgctgtgaaccatggaggttattgttggtgtttaatgcgctcacacagtcaattattctttcattaatctattgagcagacatttgttcataacctgcagtatgtcccaggaaagtgccaggcactagttagtataccgttaagtgcaacagatggccctcgtggggcttagagttgtgtgagagaggaaggcaataaaaggggaaaaaaaagacaaataaatatagcaaaaagctttaataggtactgtgaagggaacttacttaaataatgggttaaggaaggaattttttagtagatgacttaaactaaagcttaaagaatgagaagaaggcagccatccagagagtagaggagaaaacaaacagaaagaccaacatttattcattcattcactcgacaaatatttatgtagcactttctaccagccagggactgttcaaagcaaagcagatataccaggaaggaaaacacacacgtgcaaaattgctgaattgagaaaggatttggcatgttctggaacagaaaggaagcttctgaggctgaatcacactgagcagggcacagtgtggtattggatgaggatggggggtgtggcaagggctagattatgtgaaaatttgtgatccatggcaaggagtttggattttatcctacaggcagtgacatgattttattattgtgttaaaagattgctcttgctatgtggagaaggtttggagggtggagttgggcacagtggaagtggagagatccatggggtggctattccagttcagatgagagattttaatgccgtggtggaaacagagatacacaaaacagtacagtttctgtatagagtggataggacctgttggtcaactgaaaaggagaaaggaggttgggaagggaagtaaaatcatggatgattctggtttgtacaactgagtagatggtggttccatttactactatgagggagaatgagtgagtaggtggttgggagcagggaatgaaaactaagggggcggggaagggtgggataaagattaaactaaagtttcctagccaagtcttgaagaattaaatcaattcaaaaatttaattcattatgtcagtggttactatggccccatcactggaatatacaaacagaagctaaatgaccatttatctgcaatattttagatacaggtttcaaacatatatctagaactgattttcaaatggtaggtgagaacttacaaaagaaagcagcaatttcttgaagccatcactactttagtaaaaactagttttcccagatnnnnnnnnnnnnnnnnnnnnnnnnnnnnnnnnnnnnnnnnnnnnnnnnnnnnnnnnnnnnnnnnnnnnnnnnnnnnnnnnnnnnnnnnnnnnnnnnnnnnagtgagtattaatgccaatgactaagttgcaaaatgttaaaagaggcaacattgaaaggtggattgaggaaaaactcaggagtttggttttagatgttaattttcagtgatctgatgtagccaagaagagatatcaacacagcagagaaaagattaggcagagagataagtttccaagagatgcacagatctagaaaaaaaaagggcagtgggacccagaaagcaggttgaggtgttggcctttgttaacagcagggacacctggtgaaagaagaagaagggaagatgtgggtgtaagtggaggtgataatcatcatcaccatagcttatatttattgatgtgtaccaggtaatgttataagtaagtttcatggagtaactcaatcctcatagtaaccttatgagtaggtttgtacgtacactgtatcaaaactgagagagtctcatcagatggtctacattgtggaaggggagtcaagagggacatccccaggaaagaagctaggacacagttgggatagaaagtattcagtggaacttccaggcaagactgagagttcctctgagattttaaattatgaatataaagtgaatctaacccaaaatgcaaatggattttccacagcattcagcaatcagacttcagtggcctgacttaattggtgcttcatgtggaagcagggataatttccaatgccaggagtaataatcaagtacactattatcccttactagtatgctagcactttatgtactttcatgaagctgccttggggacttggccacaagaaaccttccacccaccaggctacccctcaatccctgctcagaagcagaaaccatggctccatgaaagaataatatctagagtgaactacaaccactcatcagaaggatgaagaaattgatggctgactttaagcctcaattctggaagaggtccaaactggatgctttgtcttctacctcacagctttccaggttcctctcagtgaccagggtacctcctctacctaagaaatcaccatcagctcttcccactgccaagagctcataaatgaagaagggatgcaaaatctttacttgacacagaaagctttaggttgacaacaaatagcaatagctaacatttactgagcatgtcttttatatcaggctgtgggctaagtgcttttatatgtagtatttcccttcatctttaaaacaaaccagtgagataggaatccttatgatctcatactacagataagaaaagtgagctttagggaggttaaataatttttctcagaccaagaagctaacaagcagagcagccaagagtggaatccaggcagtctgactctagatactaggctcttttaacaagtacagtataatggcaaatcagccaacatctctgctggatcaagctgttgtatatatccatttgttgtcacatgttgtcacctttctatagatgttacttagaaaacaaatggattttatttccaactatatttagaccggtttctactctcccatgttctcaaaatgagacactaattgtgggggaattatggaattaatagattttattatttccctcttttgaaagcaaacatcctgttacagagtcaagtttatggtttgttggttttttgcaagcctggtgacctatgttaagagaatttcccctgaagtcaaatgtgctgacacatgtgacagcataagctgcactccatgggctccaaggactggcaataatgacctgtttttttttcccaccatgtaattatgaattgagatttgacttttaaaacaaattcccagataattgaggtcaatatgaaaattttagtttcaatatccgagtatcttaactgtgtagattatttgtgagtatactgataataagctccttatgttgacctacttttaggtggttgtagcctgtgaattgtttttttcataaatgagggatatatggatttgcatggagccattcacgcattctgcacataattagagccaaatggtactcattaagattgaacatgagatgttaatttccattagcgcctggggaatctgcatttttaaataaagccccagatgattcttgtataaatcgaagtttaagaaacattgaatagatgtgctctaattgtttgatttattttctcttcttttcctattaaggataagaaaaattaaatgacctttaacaggcttgactatcactacaatagtaataatagccaatagttggtgaatgtttatctttgctgaatagtgttttatatatctatttcatgtgtaacacattcttaggcagagattatcattagccccattttgaagataaaaaacaatgagatggagagagtctaagcaacccaagatctcatagctactgagtggcaaagagagggtttagaattatacttttgcctttgaaggccaagtcattatctggagacagataacaatggatataaatcacagctttgctacttaccagcttgaaagatgagtttaataatactgactttgcatggttattgtaaaaatgacagaataatgcatataaagcaccaagtatatgcctgccaagtagtagatactcattaaatggtggctattaaatgtcagctggaaagttgaacaggtattccatgattttgatcactgtaatcagtgaacacacgtaatccaaatacctgcctacatatcgtacactgttcttattgttttaactctccaaattatttacataattatctctacctcctccttcccactatctctttagatatgatctgtgcctaagactccctaagacactaattctacatgatttgaaaagtaacataaatacttttattgtttttctatcctaaggaagtttgaatgaatttaagatattttccaatgactttagtacgaatgtttgcaaagggccagagctccctggaagtaagttgaaaaacaaacccagctgtaatagcctggtgacccagcagcccagacctgccattataacccatttggggattgcatggtaattgggtccatggcatttggcttagtggttctgattgtgacacatgatgattcaagtttattcatggacacactaaagcatcacaaaatgaccttttttgaggtccttgaggtcaggcggggagggagggagaagcactggggcactctaaacaaagcagctttgtttttacaccgcttgcttggacaagtgtctcctcacgtgcagcagtcatttgctgtggagctcttggcagagtaactaaaatgtgacagaaatgaagggcaaattctgaaatcccctggaaaatcaccctcccaagcaaatatttgccgtggtattgtagctcgatgacttatttttgtcattcactttttttggctcattcctttcctttatggccatttaaaaggtgggtaaactgaatatttattgagcatctactatgtgcattgcatgtaccgtactgagtttatggaagatagagtctgagctgaaatcatttaccatctctagaattcatcctccgtgtctgcaaaatggggatttgggcttcatcagtgattcccaagttagtttatagtttattaaaccatattcagcaagtgattcccaagttagttacatagtttattaaagcatattcaacattgcatcttctatttaaaacacacacacaaaatcttcagaaaaatctttagaaaccaagaaaataaactttaacaaaatcttctcagccaatagacatacaaaaagcatagaatctcaacaaaagggccacctgaatctgcataaaggctaggtatgtgattttgttgttgttgttctcaaccatataaaactggttgagaactccagatcagataatctctaagatttatctcaggttcaaaaagctctgtggctggacatggtggctcatgcctgtaatcccagcactttgggaggccaagctgggcaggtcccctgacatcaggagttgctgaccagcctgggcaacagggcgaaaccctcaccgcccgcatagttcgcaaccagcccaaagtcggggggaggggcccggactccccgctactcacgccggcggaggcggagcatagaccgaaccccgaggcggccggcgcaaccagccgcgcgtgccggaggtgatgtctatcggcgacgcagaggtcgcccccgaccgctccacggagcggcggcaactgcgggtctcaggcgggcggcggaggcggacgggtgcccgcggccgccgcgcggcggggggcggggggggaggggacaggtgcgccggtggaggcccgtggcggcgcacgcggcggggggaagggcgggcaagagcaacgccttgaagatgagggcggaggggggagccgtagatcaggaccagccgctgagcccgacgcccggctgagcccccnccccgcccccccccnnnnnnnnnnnnnnnnnnnnnnnnnnnnnnnnnnnnnnnnnnnnnnnnnnnnnnnnnnnnnnnnnnnnnnnnnnnnnnnnnnnnnnnnnnnnnnnnnnnnactttggaagaacatcctaattgcagtgcaggaacaaatcttaagaggacaataaagaaagtgggagatctgttagcaggctattgcagttatccagccaagatgagatgataccttggactaaaatgaggctgaaagatggatataaatggatggatgtagagttatttagacatttcatttatagatcttagtgatggattctgttgagaagaaaaagaatcaagactagatcccgagtttttgcccaatatgactagaaaggttaagtcattctctgaaaaaaagaaacactgggaaagtattagttggcacagaagcatgattccagttctgagtgtgttgatgtgagtggctttgtgacaccaaagtgcatgtgaagtagaccatggaatatgacagtctggaattcaaagaagtccaggataggaattatcacagggatcatacataaggaatctgaagccatgagatgtcccagggagagagtgtggaatgagaaaagttgtgagagacaagactgacacgtcaggtactctattagttcataagagacataaaaagatcggcatgtaaaggagattgataaagagaaaccaaagaactaggacaactaccaagagactctggcttctaagaaagctaaacaaagagagtaaagaaggacgtgggtcacaatattaaatcctcctgagagatttatttttttaaaaaaggaaaatatttattttatttagaaatacgaatatcactgatgaacttggagtgatggtacattagctagtttttagtaagtaaagagtaaaaaggaagtaagaaaaaaatagaggcagtgagaacacataagaagttcaggtgcaataaggaagattgagataaagtgctatctagaagaggatgagaggtaagggaaatttttcttttgaaagtactaaacatacttaagagctacttaagtatattttaatgaaaatggaaagcaccctgctaagacaaagcaattgaaaatagaggagagagattgaatcattgatactggctgcctgagaagcagaaataatgtattccaaagcactcacagagggattagtcctggaagaactttcacagtgttgtcgcagggctatatgcacagccccaccatatgtcatggtcttcttgataatattatgttaatctctgattctcttgcagatttagaagcggcaacacttctcttgcctgagattgggatgatgtggctgagactgccttcctggcagccaaatgggctattcagcagtcacaacccctatgggtggttgaccggggtgcccatttgagctgggtgtgctatgtgaccacagatggcttcggctggggcctccgcttttatgtaaccatgccacaagaggcacattaggtgatcacccacacgagcctgtgcttggctcagagccactattgtctgtaaaaggtatagttaccctgctaacactgtacatacatcttgtgcccatggctcgcacccaggcttgcttgtgcctaggtttgctcatgtccagagacagaacaaagccacatcaaaactatatgattcaagtgtttttccagctacccacctgtcatccactgactccccttggacctcagttagaacctgacaccaggatatcgggctgttgtaaatttggagctggaatggtcactttctccaaagctgcctgttatttcctccgcaacagcaatctcttcctctttggttgtaattacatggaattgcaagtcccttagttacttcctcaattataaagaattaactttctgggacctgcttttaccaaactctcttgaatactaatgtttcttaagtagtctgaactgtctcctctgagtcaaattattttgcctcttttgagctctctgtgtctaaattgtcactgtaagaatcctatcaatgccaaccttgatagtgtgtctaaccagtcatctgttggtcagtcagtcagtcaagaaaatgatttactaagtacctaagacctgctaagcgctttctagtaactggaataagtagttgctctttttgtcctgttagctctcctatttttccttttcctaggtcttttgcagttaatataataaacttaccctaccacctcaggtttttaacatgctataacttttctacaatctattttgctctcctatccatttcacaggcacatagaactttagaattggaagggaactttgaagttagcagatctggcacctcttacatttgaatgtgcatataaatcacctgaggatcttgtttaaatgcagattctgaatcagtaggtctggggtgaggcctgagattctgtatatttagcaagctcccaggtgatgctgatagtgctggtacttgaacaaccctttaaagagcaaagatctagtctcctggttcatgactaagagtgtacatcagaatgccctgcttttgcaaaatacagattctgaatcagactctaggcagtggggctgggacatatgaagtttgaaaaggcagtctcagaattccacttccagtcaatatggaataacaggaattggattcatcatctgcctgaaacaactaaaagaaaaaaaactgaaaaatcatgattcactggttttcaagacattagtgaataaaagagtcatttctggggacatgaaacaaatgacataagccccatgattgtcctagtttactgccttgaaagtgtctccaagccatggaatagaggagagtaacccaagcagagcccggctgactccagagctgagaatcaggcaagaaaaagatgggcagagttctcagagcagagtaccagaaaagaaggagcttcacagagagaggaattcagaaagcccccttcaagtatatagcagaacactgattagcacacaagtgccagaaaactactcaaggcaaagaactgctagaaaggataagaagtaacaaagccctgtgctcacacaggactgacaatagtacctgtatccatcagccaaaaatgtcatgattcagggggcaatttcagaatactcaggaaggacttccacaggtaaggaataatgagttctagagtgagcactgctacaaccccacctaacaaatcttaaaggcaagatttaaaaagatcagtgtttttaagcaatttaactgtattgcagaataaatctcaagaatatttatagaaatacaaattatccagcaccaaagtaaaattcacagtatatggcattcaataaaaaattatcaggcatggagagaagagactgtaattgatagaaaggagaaaaatcattaaaatactgactctgaatgttagaattaagagacaagaatagatttgtaatatttcatatatataactctcatgtatataggttttcatccacagttgcaggctcataactctcatagcccttgttacaaacagatctacagaagttacaaatagactctttttctctctctctttctgatactcgtctgccctcctttcacctgcctaaggcaggacactcatctaattgtggatcatgaaacactcattccagagggggaatcctgccccatatcctggagaaagatatgttgcagagatgccaagtagaatctgaacagacaggacttgctgggtgtagatcacactctttttgttcaatcatattttgacatggttggccatgcttcaatcatgcctacccaatgaagtctccataaaagggccaagaggacagggttcatggggcttctggagagctgaactcatgaaggctgacagaaaggtaaacaagaactcaaccacatgctgggagggtggctcatcccaactccagggagacagaggcttctgcactcaggatccttctggacctggccctgtgtatctcttcatcagctgtttatttgtatcctttaaaatgtcttttataacaacttggtaaatgtgtctccctgagatctgtgagcccctttagcaaattaatggaacccaaagtggcaatcatgagaactcgaacttgaagcaggtgaatcagaagttctggaggcccagacttgcaactgacattgtggggttgagggttgagggttgaggctcagccctcaaactgttggatctgatgctatctccaaaagacagtaatggaattcaattgaagaacacctagctgatgtctgctacagatttgattgcttgcttgccagtggggagaaataccaaagtattttggtattgactattgttttggtgtgaaaacagaggaaaaattgttagagtttttcttaacaacagtaaaagttgtattccatatgtttactatgtaaagtagagatagggaagatattttcaaaatacagtaaatagggttaattttagaagattagatattgtggaagaaaagattagtgagcttaaagatggaacaacaaaaaccaaatgaaacacagagaaaagagaattaagaaaaaacaaaaatgatgcaannnnnnnnnnnnnnnnnnnnnnnnnnnnnnnnnnnnnnnnnnnnnnnnnnnnnnnnnnnnnnnnnnnnnnnnnnnnnnnnnnnnnnnnnnnnnnnnnnnngggcctcggtgggntaccctncctccgggcggtanagaaacccttccccacaaaataatctcttttttagaacttttcctttccttagactacagttttataaaaagtggtaattactattaaatgttgtaacatcgtttaggggttttagtagataaaagtttgaaatcgagtctgtgaaatttcagccataattagaaaacataaagaaagacatactttgtaattcctattatttctgagaaacattttttacctggaaagggatagacagagcattttgtaagcttgctagaaataatgctcctatatttatgaagagggaatgtttacatatggtcttgttctgcttgtgcattaaatagtgtgacataggaacaacacaatgggaaattaccaaagaatcacactaaaatatactcctaagcatttgaaacaaaacttttaaaaaatgatacttaacaatttcagtagagaaactaagtgttgatattcttttttcattgttcacccatttcttgatagtgaaatgtttacaacccaaaaaaaggatctcaatcaataagtaaaataatttgcaaaatatatttatcatcaaaaattaaagctttctaacaaaggaacattgagaagtacttgtggcatttccatctctcaccacatcaataccaaagaatgtgaatgatttttgctgtgtgtggtcattgggcctctcctttgggcttagagccctgtggaaggcattctagcccctccctgcaggtggtatttggtagcacatccccagttcttctttatggagctaacttttaggggttgattagggtacagggcaagagatgactgagtatcaccgtatcacccacagtcagtcttgttgaagttcgtctgtgctgtctgtggtgggtatcaaggggagtttataaaaattccttggtcccaaaccattcatttgttcatttgtttattcatcagacgtgataggcatggcccttagcactggggttaaaaataagaaaaagattcaaacctaagtatcatctgactcaattctttaaagtatagaaatgaggataggaaggaactaaaggacaagttttaccactacctgtatctgatcttaactcaaatgacaccgcctgagaaaggtggatggtgtttcccggtgaagtgcaatagacaacctacatggctggatagagcggacctgctgactacccaaactaaagaaacattattccctttgtctctatcacactactatgttttattttcttcatggtatttctcactatctgaaactatcttactttcctatttgttgtctatctttccctcagggaccttgttccatacactgctgtattctcaggcggagaacagtgccttgtttcatagtgggtgcttgctaaatatttgttgagtaaatgaatgctcatcaccattaacataaaaccacacttgataaccaacattttttctatctccaaaatgtctgcaagttgtctaatcttgtacctcagggatctacctcacaacttcatttctgtgggaaaagactgaggtgtggggggcaggatacagggagcccctgtttcatttcagttagttcccccacagagctggaagtagaagccggatccctagaatctcagagctcttcagcattcctgtgctacctctggttgagcctttctgtggagaaagcagttttggattactgccatgaatgtaattttcaaaggccctggaagaagagaaagcaatggaagctgcttctagacttcagatgagctgaacatcagagttcgtcttcctagtctgtggaagggaagtcatagactttggaactgaattcttatggcataactgtaatattctgctgtagctgtggccagaggagttctgcctgccttcgtctaggtcgtgggctctatattaggctggctgtgtttttcacagcttagtccttcattagaaattaggactggctgcagcctgcagtgactaattatagaaagatgggtcattgtcattgtgggtaaaaacacatgtgcctgttaaacttctctgtctatagggatcagatagtacatttgaagtgatagccaatataatcacttaagtaaatggataaatatttatttgtttttattaaaatgatagacaagcatttgaagacattcatttctttttctttttttttctttttgtgagactgagtctcactctgttgctcagctgggagtgcagtggcgcatcttgtctcactgcaatctccgccttccagatgcaagtgattctcctgcctcagcctcccgatacagttagtttctgagtacaaccgaggagaatattttccaatagaaattttaagaaacacagcattttttcatgactatgcctacccccacaacacacacactctatacagaaacatacaccttattatagaaacattttctgtaagcaaaaactcctaggacggagttcctgggatactgaagggagaatgcggaaagaagaacctagtgactccctttaagagctccactgaggtcatcacctgccagaggttttaatccaaatgaaactggctttttgtcagatgcgagaaaaaactataagatctttgcattcatttaacaaatatttgttatgtgccttttggtgtgatactcagctctaggccctgggactacaaaactaaatgaaggcttcattcctgcttcaaggaggtcaccatctggtggagtgagagagataagtaaacacaagagtatagtctagcatggccggttctggaatcaaggagtctaaggggacatctgaggggtcagggcacagattgtaaggtgtaatgaaaagaggtcacaccttagcagttttcaaatgaagcttcacatttttcaaatgaagcttcacattttggatcctccattttctcttctttgaaatgaggcaaaaagaattagcctgccagagttgttataattcaatgatataaaagagactcagtgagtaatttctaagaaagaaaagcaaaattgagacagcaagagctctctcccaaaaggcagtgaaccattctgcggacctgtggatttgaatctcttttgtggagtttgcagtctttctagcgggttatttgttagaataagccaaagaggttcacctagagaatgactaagttgcgaaagaaaaatctcctctggttcagaaatgaattattcctaggatgttgcttcatgagtctttgttacagaaattggagtttgtgcaagtaattggggatcaggaaacaaccaccctggggacaattgcaggcaattctgcgaccacctggcttaacttgaattctaggaagtagagcttctcttaggttaatcaaaggtttcatggtacaccttgtggctcttttctttatccctgatttttcctcccaggcttatgaataaggcttcagttatgtttctccctccaaaattgccagcagccccacctgctgggcttggaggctggggcctgcagcctaaggacagtgtggcagtctgctgccatctgctggctcacgtgtcaccagctcagggctggctttgcaaggattccccaggaatagaaaccaccaggagaataactgtgggccagagaacgttcctgctcatattgaaaaatgaagagatgagaagatggcagacacaagctggtataagaaggcttttctcctcctgcgagtttgtgtaaagatgtgaccatctcaaacagctaagccagtgatatttctatgcagatttgttttgctcagggagaacatagcagtgctttctaaaaaatgtatcttattttatttagatcactgtctcacaaggccgaacaaataaattaatgacacatctctgtagattcatttaaaggaaacagcagaaacacaaggcagtggggtctgaggtgggtatagggaagcagaaagaggggagggattggagaaacatttcgcagtaagttatagtatattttagttggttctgtccacattttttgaagacctactgtttacaaggctctgacccaggtgcctgggatacaagaatgagtaatacttagtaatactgagtcccttctggcttggagataacaatgtattggggagcagtaaataaatagagaattaaaacagaattgcaagtactgtgataaagtactatggtaaaggaatctaggagagcacagaggaggagcatgtgtcaaaatcaaactggactgcagtgtcagagagcgcatactctgggagatggcatgaactgaattttgaagatactagctcaatggagactgtaatgggaaagacattccagttatgggaagcaccacttctcatacagcccatcacccaccatcactgcctggaagagctgagaacactagatacaatgcaagagaaggctgttaaaacattaggtctcagatgagcaattgattcagtccagggatattggcagaggcagggagaagaaggcagatccaagtgagcaggcaacataaataatcttgaagatcagagagcagggcttggcagggtctttggacccagggaaaaggccactttcaatgccgtgtatatatgggcaaccccttccaggcaggtataagtcacaatcaaatattcagaaacttgtgagtaacttcctgtcttaatctatctgaaacttctgtgtgacctcatttaaatgttgaagtagctacaagctcaaagttatcaactgcaacattattcagaattgcaaatatgaagagtgaaagtagagaaaatgcttgagaaaattgtgatacagcaactgaatgaagcagctcatggaaaatgctaattctgaaaactgtagcacataacaaatacttgtgaaaaaaatcaagatccaaacctgcaggagaaaaaatattcagaagagaaaaaaataaactgctagtaatgatgttgttcttttctctattgtctacgttttatataatattcttatatttcttttataatgatttttttaaaatataaagcagcctaaaggtgaaatatgtgtcctgatgaaggcagaggcaaaaattaccctaaacaaataatggccctatttatgtgtttgtttctgctactgtagattccattttcttcctaattgtatttcagtttgtgtggtatattcattttgcttattaagcctgtcctcagccttccctttgcccacacccctcctcactccctggatctgtgggacgtattgtgatgtctgcccgctaattttgctgtgactggggctggtgtctggttggtgattcatgtttgttccaaagttgtacatctgtgttggttgctttgaagcagtgccccagggaatatgaaaggccatttgtctccctaagactgcttctttgcatcagagacttcttccctggcttcgtttaaattccagcaagctctcctgagtttaagtagggtaagaaggaaagaaaacaaaagcaaacaggggcatcatggagagatcattggagtcagggtctaaccccagtttacctggcataagtgaacttcttggattctaatactagggacagaatgcctatgacactcattttaagggtaatgctttgtggacttaccctctgcccactaggaatgcctttagcaaaaaagaaggcagaatgagccttggtggaaaccctgaatggaaagagttctaagagctcggtgggcatacccacttggcacctgctctaagattttagcacagatacacacagcagtggtattcataatatttaatgactggcactgcatgagcactgatgaattaatggacacaggcacagtgcttccagacaccaatcctttagttactggatcaccaagaagtccagctgaccctggagggcctggggcagtggatggatgctaacagttttaaaagtatgttagtgttttaatatccagaaaggttgcacagatacataccagatgaataacaacataaatacatgaaatttctaaactcatgcccaccattaagttttgtgtaatcccctcttcactttttaagaacctacctactttgcccttaaaaatagttcagagcccatgacctactgtttctaggggtttgggtggcacacaaaaaagcccttatccacagaggggctttttattttgctcaactacgatagatctcacccaagggaagtttgcaagtcgctttattatatttttgcttgctgcaatgtatgtggctaacaacgtagctctgcctccaggcaggctggcaagcaggctgctagtatgagtgattgtccacctgcctgtctgcctgcagtctttgaaaggcagccccatcccagaccattagcctactgagaaaattcatctacagtaccttgaaagaccaaacatattggattgttatagcttttctttggccttttacccagacattatcattttctgcttcttatcagacacctggagtttgtgggttgtctaaaagcagcttctgtgaatggtctctggggaagccttataaccctgccttctgtcatttcttctcctcatgtttcaaggaaacctacagcttcagggtaatttgctgcctccccgttttcattcaagagagcagccaaggttgcttatagtctaactggctctttatgtaccaaattacttttggttgaattcagagactaaagaggaatttcactcagttatctattgggccattctggagttctgtcattaggaaagtctgaggttgtaaagaaattagttgcaagacatgagtcttccaattctgctctgcaagttactagcctatgactctgagaaaggtatttacatcttgctaagcctcatttacctcaaatgtagagtaggatcattttatatacttcacagggttgttaggagtaaatggaataatgtattgggaagcactttgtaaagtgaagaaatataagcaaaatccacccaaagtgagctggttgtaagaactagtgaaaggaaagaaccaagaatgtagacataaatcatggccgctgaattggtatacaggaaattcactgttgtggtctaatttgaaaaaaggagcatcctcagccccatatcttttgttcaccatctctctgcaaagctttagctggggagcagtgagagttctggagaaatactagggaagaggattactgtcaatttgaggctaagagagattgtgtgtgcaggaaaaaatgcatatgtaatgataaaggagaatgtgaaaagggcacagtgcccagggaaataccaggagcgtggatacagaaaacaagagacaaaatctctactgctcccgtctgtgtgttcattgatcagagcatgttcaaataattctgggcttgagggcacctttctagagtgacgaagaccgataggaaacctcatgacactcctctgtgggagccagtgaatgcatcctcccccagagacaaagctctgcagccttggagagtaatttggtgttagcagattaattaagtcattttctgtggttaaatttgcagatgaatattaaatctcaggctgggcctcccatctaataacccagtggaggttgtcaggataacactttgttcctgaaacatttagaaatacgtgtattgtatatttaatgagactgtgatatttattcatgacaggaagaagtcttccagacaggaagactttactcatgtgatagttcagggtctgacacctagagctgtgctgaatgccccctctaaagttgcttattatcaccaagttgttgtatgcctggcaccaacgccgaatttgtccaagttactcatgtcactgaaaggccatggagtttgctcctgggttcaaattctggctccattatttgctaatggtgggcatgggtaaataactgaacttcagtgcgactcagtttcctatacataacatgaaaataataatgactgcaactctaagctgtgttgaggatgaaaactttccatagtacatacagttttatgtaaaatgcttagtgtatagtacctgccacacgttggttctcagtgtatactatgtgtcctcctccatggttatcatgtgaccagagtttcccactttctctttaagctttgatgtggaaaatggcccttccccaggtcggagtccactggatccccaggccagctcttccgctgggctggtacttcacgccacctttcctgggcacagccagcgcagagagtcatttctctacagatcagacagcgactatgacttgtcaccaaaggcgatgtcgagaaactcttctcttccaagcgagcagtaagtacaagctctgtctggcttccagtttcacatttacctcatctctacccaggtcacagtggcagcaacaacaattccccattaatctatggtaaggatgaaggaagaaaatgaatatgagcaggggtgacgtgatgaccattttaaggacattaatgctctatagcatgcggaatatgtagctggggtctccaagggttttggaaaacctagacacagtgtttactttacatcttttactgataccttaaaaaaattattttgcttcatttcctgaactgttgagtcatttatggcatgagaaccttaacactttttatacatcacacttgaaatttcagctgtgtgtgcagttttcatgaggctccagcaaagaggaaaaatggtgattggttatatgcatgctgtctcagtagcctttgcttggtgactttaataagatgtcattcagacacatgcctgtgtcccttctctgaaactttaacacaatgcccacttgttgcctggctccttggtgagacacaacacactccaccgccctgtaaagcactgctgatatttttgttttgccgctattaattgtaaatctctaaattttatttaaagaacaagatctaggttgtgtcacccatttattaaatttccaaaaccaaataaaattggattctggaattcatgccttaaaaggtttctgggcacagatacaattgtttttatattatatgtcataaaagtatcagtagctccctaaggtctccagtttggaaaattccactctgttctcttctgctattggaagggaagtcaaaaatttcaccctctggtgaaagggggaattttgaagctaccagcaaaaaaatattccttgaggcatttctgccagcacattttaatagacgcacccctgccctaaaatatctcaatcattgtgtgggcccaaattcatttttcagtcatttggcaaaatttactgattctctcctttgtgccacacattgtgtcaatctctggtgataaaagacaaacaaaacagtgtaaaaatcacagatgagttaaaagcatatctcattctcaaaaaatgtgcatgctgtcagggaggttacagctaaataagaaagataagaggaacacacacatacaaacataacagagtgaaaggaaataacatttaatgagcacttcccatggagccgagctcatgttcttatgttatctctgttaatctgtcaggtaggtgtctttattatccccactccatagatgatgaaactgggactctgagagattgagaaacttgcccctatcccatgactgtgtatcatgctgtgtcccatgatgtggctaagcctgaccatattaaaaacttttggaatctttccatccatgttcttcaaattgcaaagtggcatctctaccactaggtagaaaacaaatgactgcagagtagaggtgtccaaggctgcaggagaggtaggtagccagcaactttgctgtagatcttgtagaacccaaggcatttctgacaaaagtttgaatgggggtctttgaatgcaaagatattgggaattctttccttcaccaagataaacacctttctaggcttcatcatggaagaccgtaggtcatgtggtgagctcaaagtaattagagcttaattcacatagtattttacaggtgcaagattagctttgaaatcttgtcattccccaaaaactaattccctggctaagagctctccagactcaagccaaacggcaggaagaatctcaaggtcattcagagtcgccccagaaaactctactgcacttccagattaaatcttgtgtttcattatttggaatcaaaaggttgtagaaatgttaaatttgaagagaccttaaagatcacaatccaactgaatctacggcagtcaaaaaagaggtgtagttctaaatgacaccgcatccagcatccctgttactggtagtttactgtcctttcaattttactggccagtaaaattccccaccacccgccccaccccctgcccccagtaactttagaacctaaattttccaactttaaatttaggcaagtaaaaattatatatgtaaattatttaatatcattctcactttttaaagataaggacttagataaaaagtagtatgggcacaatttcataataaaaagcagcctttcccaagaaaacaaggttggcaacataataccaccctatcaaaaatactgataacaggatatattaaaatctttgtgtgaatgaaaatagcacaagattttgttttccaaatatttcagtaccacagaaaaaaacttttatatatttgtcagttttggaattatatttcacaacacgctgagaagtagagtttgaataatattaagcttcttctagtaatttagttttaagttggcaaatccagtttcacataaatatctgaatctgaactaaagtaatgctcttaaagctatttcatatgattattaactctttaagatgaatcgaaacagaggaacagcagctccccacacttcccgcccctttttttgccttctacccatagatccaggaagcaagaagggtgctaatagaccaagagtctagatgtgaaggccactgggtgggggctgccggatgttccctgctcacagacctcatacccagcacagagctgtcatgaattttttatgaatggtggaaaactttgcataattctactgcattaaatcctagtaataaaggaaacactagcttttaaatttttctcatctgaattttttcagaagagtaacagaaaattatagtcaggggagagtgagtgaaaagatattaagagtaaaaatgtgaacaagaaaaattaaaagtagctttaactttgagcaacaaaggagaggatcagaataaggctttatagtgaagtaaagcaagatcaccattgggtcccaaaaggcaatttcagatgctttcctagatgtggcaatagtttgctggtttctgttcagttcctgtgttgtagtcatcccaaacgtaatgccttcgtatactgaggtacagattgcctcatgggaacataaagtactggaaactagtaaggccagttttactgctgaaaactgtggcaggaaccaccatggacagaatggagttttgattatccacctgcaaagccacaggaaaggaaactccatgttttttttcatttggtcatcccattttgcaaagccttacacagacaagaagcttttgaaagccaccatttacgtgtggactaagtagtctctagagagagcctactcattttcaagggaaatgagacctaagaaccaagaggaaaagcagaaataataatccacttaaatttaaaacctgtttattgatggactagcaaaaagtgcagtgtggtttctaagacttgagttagacttacaccatcacacttactagcaccatggcttttaagacattgaatctcttttattgtctctaaattatctgtaagtaaaagcacacatttattgagtattttctgtatgctatctgttaaaatactttacatatgttaattcatttaatctccatatccccaatgtggtaggtactataactttcttgttttaatgatgaggatattagggcacagagaagttaagtgacttctccaataaatgggaacaagacgaacccaagaagtctaggaggtaaactatatggatatccagtatgtaaacagactctaagtgaggctgaaaaatacaaaataatgctattaatttctgttctgcctacctttccagctgttaggaggatcatattcattctctcttttaataagtatgtaaatttaggaactttgtgaacaaataagacagtttctgtgtcttcaagggtacggaaacattagaagtcaataggcaattttagcagtttcagataagggcaggcatagagagctatgcactggtttgaaaggtctggccaggcaggaaagcagcctactctgaggaggttacagctcagctagaggagtcaggcaggcagaggaagtgcaggagaggccaggtgctaactaatcctccagttagtgtgggagcattttggagaaccacagctcagtgtggttgatccagaggatatgagaggatgaggaagtggtgaaaaacaagactggaaaagtgagcaggaacctcatcatgaagggcctatgttaaggaattggcctttatgttgcaagtggagagttactaagcagataaacatataatgcaacattttaaaaaaatagctctgattgcagtatagaaaatggtttaaagggtagggaagcttaaaggctagtactcaaacctacagagccaaacaggaggctgccatgatattcatgtaaaagaggatggggatttatattacagatgatctagtgagcagttagtacatatttgcaagtcaggatcagcaggagttagtgtttaattgaaggataaggaagagggaggtttcaggcttggtcgagaagataggtggttgcactatttcctgggatcaggagcattctcttactacatgaaataatgtacatgaaagtgctttgtaaactgtaaatataacataaatatgagtcctcttgattgcaatggacagacatgaattaagattaaagaagctctcatcagctggaaatacagacatgcaaccctttaattatggatgcccttcaacttacaatgtcccaaaaagcccatcctaagttgaaaatgcatttaacacacctaacctaccaaacattacagcttaacctaacctaccttaaatgtgctcagaacacttacattagtgtacagttgggcaaatcatccaaagcaaagcctattttataataaagtgttcgatatctcatgtaattgaatactgtactgaaagtgaaaaacaggaaggttgtatgggtactcaaagtatagtttctgctgaatgcatatggcttttgcgccattgtgaactcaaaaattgtaaattgggcagggcgtggtggcctgtaatcccagcactttgggaggctaaggtgggtggatcgcttgagtttgagaccagcctggacaacgtggcgaagccctgtctctacaaaaaatacaaaaacttagctaggagtagtggtgcgtgcttgtggtcccagctcctcaggaggctgagatagcaggatcacttgagccagagaggtggaggttgcaataagctaagattgtgccactgcactccagtctaggtaatagagtgagactctgtctccaaaaaataaataaataaataaaataagtaaaataatcgttaagttgaggaccatccatataaaaataaagatacctactggtattgataataactataactcaataactaatctgcttttatgtgctaagcactgttatcaagagttgtacatatgtaataattaatttaattttcacagaaccctgtttgacaggtaaaaatgttgagacatggagaggttacctaatgtcgcatagctagtaataatgcagctgagaaacaaaccaattcactttggctccaaaatctgtgctgttaaccactatagtatatatctctccatatgacagacaaaaattaaggaaattacaagttaatttctgtgtgtagtgagaaaacagagaaaggtggaatgaattaataaaattcagagtgtggcagtgaaaggcagtatttctgctttctagaaaatcattttattgtttagagcagacctacatacactcaattctatgactcagtactaagactggagtgctcatttcgttattctacaaatttgtaatgtgctggctttgtcactagatgttgctcttgcaatgcaatgattctgaatatctggacttgctcctgagaggcattgccttctccaggggtttgggaaagtaagaagtgtatcagttttcataatcaatcaaatgttttataatttctatgccatttgattcttaactagtgatttatcaaattatgatttttaaaaatttataatagttccataaataatctggttgcactctaagagaagttttttgttttgttttgtttcttttctgttactttctataaattatctgatagattctctaatagcaattttctaacatacagcattagctttggcagctcaaattgtttaagggaaccaatgctgggcatctgtaaaatccattttttgcttctgaatgttctgttctcctaaacttcaaaagttccataatgataaagtcatgttgacattatgccctattaatgtttctttatctccctttaatctttggattgtacagttttaataactcctccaactcattcaacagtacatcagctcaaggtaccacctatgcatgagatttacttatattaattagcttttattagatactagactctggaaatccgggagtcatagaagatgcacttaaatctaaatccgttatcttgtcccaaattcatcctgttgtcttatgaacaatgtgaacttcacatcagaaatcagaacacttcacttgactagcctaaaaaaaaagaaagaaagaagaaaagcaagaaagcaagaaagaaggaaagaaaagaatcagaacaaaccacaagatcttcacccatctcaaagttcatcttgggaaaaaaggttggaaagggtcagtttctgatacagttcaccacactccatttatcacaactgctcctgtcttgattattttttcttttttgtatctctccaagaaccctgaggctcttcctttggctccctatttatatgtacccccacctcatggggccacttcctgccatggccttaactatccctacttttgtaggaaacccctaaatctatagctcgaattcccatatctcagtcttcctgctcgatgtctccacccggatacaaatcagtacctttaagttcaacgtgtaccttaaaaactcagtgactaccttaaactcccccaacaggaggggaaactcctcatttccttatttctactcacggcttcactgttttctcagatatccattttttaaattgaaaattatatttctttatgaccccttatccaattaaatgtcaagttctgcaaaacctctgggctctcttcaagttgtctcattctgtccctttcttgacattacctattggttctcatcagaatgggtgcaatttctaactattctttccaggtctgtccccactccaatctatccctccacatccaaggcattttactttctaaaacacttttctgttggcccatctcactttccatctcactaaaaaccttccctggctcctttctctctcctctctctttttcttttcttttctcttttcttttcttttctttcattctttttttcttttctttttttctctttctttctttctctttctttctttttgagacaaagtgtcactcttattgcccaggctggagtgcaatagtgcgatcatggctcactgcaacctctgcctcctgggttcaagcaattctcctgcctcagcctcccaagtagctaggattacaggcatgtaccaccacacccagctaattttgtatttttttttagtagagacagggttcctccatgttgatcagactggtctcaaactcccaacctcaggtgatccgcctgcctcggcctcccaaagtgctgggattacaggcataagccaccacgcccagcctgggtgatttctttctatggagttaagtactgactctataatctttgtctggactgtccataatatgagcgtgggaggccttctatccttattctctacaaatgtctatagctaatatgctctgctccacccaaatagccatcaaacatcttaataagcgtgttcagtattttcccatttcagtacctttgttcctgccatttctcttcattggcagcatctaccatccctgactttttaaatccttcaaagttcctctgaaacactgctcactcaatcaagactttcctactttctctaacctgtaattgtcatgtttcctttggacttcatgaagtatacccattgtttttaattctcattctgtattaaaatgtctattacagtttttaaaatattttttgtttcccctactttgtttcagttttggagttcatggatattttgtatgatttgatatgtcaactatgcagcaagtcataaaataggaagcataggctgggtgtagtggtttacacctgtaactccagcacttgggaggccaaagtgggccgattgcttgagcccagggcttgagagcagcctgggcaacatggcaaaactctgcctctacagaaaaatacaaaaataaataaataaaatagctgcgtgtggtgttgtgtgcctgtagtcccagctactccagagtctgaggtgggaggattgcttgagcctggaggcagaagttgcggtgagctgagatcactccactacactccagcctgggtgacaaagctagaccctgtctcaaaacaaaacaaaataatgacaacaacagcaaaaatgaagcatagtgtttaaaagcacagatttttgaaaccaaacagtctaaattcttacacttggaatcagtctcagttcttctacttactaggtatgtgctagttaactgctctgtggatcgatgtcatttatataatagcaatattaagagtacctgacacacagccctgttacaataattaaatgagataatacatgtaaactgcttaccacaagacctggcagacaacagtagtgacacaaataatgcttactccttgtcagtattctttttattgtcactgtacagagtgggcacagaagacacttgccagattaaattgaagtttggaggtttctagctgaagaaaaaggtggaaataaaagtatcatattaaataagatgtcaagttaaaagcctatgacagaggagaggcccaaatggatgcatgtgttgttcgactctggagccccaggcctcgtgtggtgcctggtacagggcacatgattaataattattggttgcactaatgtagttaacaaagaaggtgccatatttgtgtgacaatgatgaggacagggaaggtaggccagacactgagggaagttcactgttactaatttctgtgctgctatgatgattcacactgtaatagcaaagtggcctgattttgtgactgtagctcaaaccaacatgtcttctagtaccttcaatagagagtttgctgaatgtgggtttaagtagatttctcaaagtatgtgccagagagacagtgtgcacttctgaaaacacatttttgactcttcctaaatacagatttacataacactaggtacagcttaatctgttctttgggacaaaatggagtgacaatggtatgattatggcaggttcagccatacactcctattaaaagcttttccttaggtactttaagaaaaagttatattacaaacaaaaagtaatgggattcccagacagaaatctgtgtttaaatggcattaaagctgtggttcgaatcaacaaaagccaggaaatccaaagttaacctttatccagactgttataccagtttttccaactgtgtgtgtccctgtgagcagccctccctttgaatttcctggctctggcaaccaaaatccacaagtcgctttgaattacagtactctggatctgttatttaatgggaatatatcctgaggatatatgcttacttgcaaatgcttttatgtgtagtcactgtaaattcaggagtcatgaatctagtactaattttttcctttcaagctcttggaataccctttcgtgccaaattgtgagtcctgtcttatatccaggtagaagaacttgtataacatttgtgttgttaacactgataaaatttaatattatagcttatatgtcacagttataattcaagtaaatttctaaaggttctttttttctcttttcaccagacacggcgatgacttgattgtaactccttttgcccaggtatgtattatgctggccctggcttgctttcactgtcgctggtttctaagtctgaacctggccatttgtcttcttttgtccttaaccgtttaaaacatttttcttctaggtccttgccagcttgcgaagtgtgagaaacaacttcactatactgacaaaccttcatggtacatctaacaagtaaggattgacttttttgtggagtttgaatccctaacataaaggcaaaaaatattgagcagcatttaaaaaaatacaactattacatggaaaattgtcctctaagctaagttaatatacacaataaaatttgaaaacaggatggagcaccatagtattttagaactcatacaacactataagtaacctagtctgggtcttattcgtctttgtacccataagactcagtaccaagtagaaattcacaaatgaaagaacaaaaggaagatttaattttcgttgacttttacatttactactttgaccagtaactgccataaattctattaaaattctttttgaataagttattaatgaattcagatattcaaacttaaaattaaatgtagcaaaaagttcaagttcaatttgcctaatttttgattgtctataaacaagttcatgcagtttaatgaataagagtgggattatcttctcctccaccttcaattaattatatgatcttggcatttaaattaatgttgctgatccttgatctccgtatctataaaatgaagggtttgaactttatattccttgcagtaacactttctccaaaatcatttcgaatctatgagcttaagctaagttctattcggttcactcttctgcatgttttaaaacagtatcacaaaggtcagagagtcatagaacccgtgatcctggaatgagaggactggaggaggcctttgagaccattgattctcttgtttagtagaaacctaagctctcaagaatccagtgacttgctaacaaccccctccccccgcataagttagagacacagcagggccaaaacctgtatctaatttttcagccagtgttcactacagagtatcctatatctccagtctttgtgaagttatttttcagtcctttactttgctttcacacacattttcatagaatagtttcattaaaagtgggagtaaaccctgctttgaatgtttgctttttctttcactgttttatgactaggctttcttgtgagatgactctgtatactctgatcaaacttccatgtgagtgatctttctcacatgttgtatgactgtgtcaccctccagcttgaggcatttcagtggtccagtgttatcattaagataaagtttaaatgctggtgcttggcactcaagacaaattaatttgattgatagttgcttgggtttatatgtagtgcaatgtatatgaaatctagaggcttgtctcagcctcttttgggtagaactccatttatttatttatttatgtatttacttatctatttatccatccaactagtatttatttagtacataccatccattcatacatggatatatgcatttaacaaataactactgggcacccccatcagtaccaggcactggtaatataatagtgaccagagcagacaagtcctctcctcttttagggcttacattctaatacaaaatgctgtaggatgcagtgtaaacaatcagaccaggtctctagccacatggaattatgttcaataatcatggtctgttgttctctgcatactctcttctctatcctaattatggacttactgttctttcttcctaaaatgtctgtttccacttgccagtgtctgcttggccaaatcctgattgtctatgtcccatctctagtatcaccttcactgagatgctttccctgacctcaccaaacctggctgagtggccctcatttggatccagagtactctgaaaaccttatcactatctttatggatctctgcccaccactagactgtgtgccctttaggagtaagaattgggtttagtttttcttgaattcccaagaatagcagaatgcctgacatacagtttgtgcttcataaaaattcatcacatatatgaacttctgaataaataattgttggaggaaagaccaccaattatttagaaaattatatttgcaggattgattccttctctatgtttttttctttgtagaatatggcctctggcttcatagcccatttctacccccttgaaaatgatgcacttgggcaagctaattactctctctatatctcagttttctaatgtgtaaaatagggttgttatgaggattaaatgaattgatatttgcaaagcacttaaaacagcatcttgcacaaagtaggtgctcaataaatgtgagctattataatggatcgttacatttctcttgctgaatccagaagtggtgtaacactttggggttttcatatctgttgtcagcttagatcaccataaatgatattcatggtattgaacaaataaaggtattgttacccccactctatggataaggaaacaaaacttagggagaataaatgacttgggcaagaacgtacagcttccagtgggcaacagagttttccttgaaacctgtaatcctgactgtcactgcagtgctcttttcatttgccaaacctgttaagtcttctgggttataggaagaagtccctggaaggctttggaacagaaagacatttaggaagaacttatggaatagatgaaggtcagaaagcctgaagacagagacagtagctaaaacaatattttcaggaattaaacatgagggtatagctctaaaccagaatgatggagatggcaatggggaggaagggattaatatggacacattttaaaggcttcttaagcatggctggactgagaaccactacattgcacagcactagggagaaggcggggtgggtggtggtgttctcattcttatttgttagcatgggtttgaaggttttttacctctgttagtagtatcagaacattcagcccaaccctgctgattaataagctgtgccaactgaaacaactttctcaataatcaggcctttccaaacccttgagggttttggtccttgtgaacttttaggaaccaagtaccccaagaccataattgccatagcacagctgaagcacagcccttcccacactctggctgaggactacccttcaaatcacggccccttgtgtcacccttggtccaaagcaagccatgcttatcacaaaaagcaggcctccagtggtaagatagttgtatctaatgatctttctcaaattcatacccatgtgtacagagttgatcctgttactgattgcaagtactaccttgtcaccaacaaaaattcaagagagggcacatttaccactagagcttcaccaaagggagttgagagtggtgcagtctagctcagactcagtcctgaataatggatttcagacatcagggagctgaaatcaatgaaatcaattagccatctctggagcagtctggcaggggcaggctggaaaactgagtgtccatttaatgcactccattttatttctagatagtgaataccttcaaacaactaaagaaaagccaagagaaggaactgaagacaataatgtttggcaggaatggatacaacatacagaaagcatacccccacccgaacacacacacagacacacacacaaacactcacacatatacacagagttatcttaacagctgaaactgtagaattcatggaactcagatattcctttctgatatacttgacttcagatccagggtgccactccctgccttgaatgtagcatttaagcaataattgtgtcctaggagtggttttcatgagacatctggttagtgtggtttattgtaggaaaaggaactcccacatagaactatacttctcataagtcaagatttcttttatcttttggctctttgctgtgcataaaagcagtccattgtctgcttgtgctttaccactcaaagggtggaaatctcaaagttcctgttgaggtggtttccttgcaccttcatgaaatatcccattgagggatgcttgattggacctgtatttcttggctgcaaattaaaacctacacttcctttgtcccaggagttaattttgaaaatatggctttcatttagagttgttaattcagataagcgttcttaaagcacttgctgactttaaacagactgctggagtaatcaggtgcgcaagtgagtgtgcccaccattcagcagtctgatagccaggggatggagctgggagcaaataggtgtcatttatcaatcgactctgtcatcaacatcatgaatgtcacctgtggctatcaggaaataatgtaacttctttgtattaacattcttccaaagcataatttaatgaacatgtatgtaatcttcaggaaagaactaataaccacttaatttttttagtgcatatctatccaaaatgtcttttattgctgtatgtactttggcatgtgaattaaattaactgaggatcataaaatgtttagcgttcagagctggaatgaacctagccaaatttcctcagatgaagtgaagcaacataggtaaaactcctcacacaggactcagtacgttgtaaatcaccagtaaatgttagttgctgcctgctcttctcaagtgaggaagaaactaggaggttccgtgaattgcccaagggctatacagtgggaaggtgccagagccaggattaggattcctgtcttcttagtcacagtccagttctgtctccactgtgctattcagggctggaaagtatgaactgctatggccatattatcttccctatttatatcaccatcttcagcaatcagccacgtaacttcttatgattcttccataagttacggactttggaaactgagcaaccaataccactttcctctggcattccttacaattttctgtctggcattctcatgccctacaagcaatcatgtggcttgcagaagtcatttattcattgaaaatgtattgagcctcttctttgcaccaggtctcatgaataattgacaaaccaaataaacatggtccctgcctttccaaagcttccacacagagatgcttatctgaattgacaactctaaataaagccatattttcaaaattaacttctgagacaaaagaatttgtatagtatgagtaatttccaagaagtcattgagagaattaggcactgtgatttgacacgctataaagaaagtagagatttctgacatttggggtctcctagttcagtttcttctttcacaaaagtcttctttggaactcaggaaaaggtgtaagataaaattattaaaatgcattattaatccagtgcgtatgtgttgagtacctccatcatagcaaatattatgccagatccctgtgttacagtggtgcacaatgttcaatcattgcttaaatttctcatagatgagttgaagagaaagacaggaaaatgggaaatacaatatagaatgagcaatgcagtggttcagtaagcacaggaaactacagaacacaggtgagggccactcacagagggaaggctcctctgaggaggtgatgcctgagcagagtcctaggacatatgaaagagctagccacataaagagaagaaaagtatccaactgagcaaaatgtgtgcaaaggcacagcaacaaaagagagtgctgtgttcgaggaacagcaagtggcatatagaaccaagactgtatgtgaaaaggaaaccagataaaatattcatatagagtatttggttctcaaatcactttcacatcagtgggttattcaatctacattctattaacattttggagttcctactatttgccaggcaatatggcgggacctgaagagtatgtaagcaaagagatcagaactggatcctgccatcaacaggtcacagattaccagtggagataatatgtgccaatatggactgtaacatgaagaaatgaccctaaaggtacaaataaagcaccatgagagattaaagagaccattcttggctaagaggatggcatcctttggagaaggtttgatgggtaacttaaccttaagttaaccttaacttaacctttgatgggtagattgtttggtgtggagacagcttccttgacaggggaatgaatggcctgaataatggcaggaaaggggcagcacatattcaaggaaaaagaagtgttcaagtttggccttggcaagtgtgagtcagctctgtccctcattcattcactcttctattcaataagtatttactgaatgcttgtcatatgaaggaccatcctgggtgccagggatcaagcggtaaacaagttgttccctgctcacataatgtttacatttaatcaaaggaactatgtattgaacactaactagacagagcctatttaagctataattttaaagtgctacaaaagagaagtacaggatgcatgagagcacagagccagtcagtggtctgagatgaaatgtcaggcaatgaggaattatgagagataagctgggaaaaggatgttggggctagagagcaaagactttgaatgccaggctaaggattttggaatttaatctcttaattttcctgaaaaacagccctcagtattagtgcaggtgttatcagcatatagtatagtggaaagagcatgcactttgggttcagaaagacttagctttgaattctggctgtgccaattataaatcatgtgtcagtatgtttcttaaactctctgagcttcagttttcttatccttaaaatggggtgataatactcccagtggaagctaagaaatacctagcacagcctagcagagaaaagcaatcactatatgataatttcccttctcttgtcacatgtgaaaatttcataccactgagagtttaaaagtaccctgcctaagatcacccagctagtaaattaatggtagatgtggaccctgtctatagactacggctactaggtatgggtacctacaagctagattgtccctaaaggaccagagattaattcagagcagtagaaaaacctagggaattaattctgtggccacaccagtaggaagactcttctttagcaacaacgatgcaggctgttctttgtcatttagaatttggcttcgttctcacgcttgcctgtgcaagagaatgcaaaaagaagtgaaaactacagattcccaggcctcatctcggatatactgaaatagactcttcagggttggaaaaagaaatttaatagctccccagatgagtcggctgcgtatccatgtttgagaaccactggactagagtctcactctcttgctcattgcaaatgtcctgttactccttagtggagcagagaatccttaatgccagtgtttctgaaaatgtggtcctcagaccagcagcatcagcaccacttgggaactttttataagggcaaacttttaagcccatcccaggcctactgaatcagcaactctgggggtagggcccagcagtgtgtctgaataagacttccaggtgattctgatgcaccctaaaatttgagagccccgctcaatagtattcctgagaagttttccagcagtgcatcaggaaacaggagagtctggtagaagttctgcaaaacatgagaagaagggtaagagcagtgaaattgaaaggttaggggcagagaaaggaaaagaaacaagaaaaaaggaggagccccagtactatgggaacatgggtttgcttgtttcatttaacccctgacatcagcaggcttgttatgatgtagaatgacgtcccagttcctccatgaaaattctgttccctaagtaaagcaagctggatgactgttcccagtggttgtgtgaccttggcaagtgacttcacctctctaggtctctgtctcctgaggtacaaaaattaggggcctgaagtgattgatcgccaagggttcctctggctataactttttacagcactgcccaaaggaattgagattcactctggcatttcgagtgatgcctgagcaagtgactctttttctcagggcttcttggaacagcaaaacttaaaacagggggctggtttgggacctggagtaaacaacttccttcctggagagtctgagcatcctgaggacttgcagagggaaattccaggccatctggatgtgagagaattgcagtcatctacccgggttacaggagcttgccttccggagatggcattatgtcactacatagttcattatgacctggaaaagtcctcagtaaccatgagggtggggtgtcgggggtggaatgggcagttttgatacacagactcagtccttcttttctctgtctccacaggaggtccccagctgctagtcagcctcctgtctccagagtcaacccacaaggtaggccatgtcataaggtctatctagatgtttcaagatagaataataaacatgcctcttattcagaactgttttttagaacaatagtgttgtttgcatattgtggctctcaaaagtatgtctcttggtgacttttttctaaggtacactggagcattacttcactctattaaaaccacattaaaagcagtactaaataatttgcccattgtatgtgcaggctttcagaatatgataaacatggggtaatgctgcctcttccccaaagaggagcaggagacagagttgtattgacagtgcagcttgacctcagcttgctggccccaataaactccaggagagctaacatcgaagacctaaggtgctccacgttcgcctgagggcccctgcggatatgttagtggtttccctcttaatgtcaactatagattccacttgaatctacatcctttccaggtgtgaaaccaaaggctctttccaggtcacgaatcatttcttttggagggcatccaactttgttcctcaacggtgttttgttttgttttgttttttgttttttaagaacctaacctctcatctttcaggacagtgcatccacttttcttggtgtgttgagagctgcagagaggaagggccaccttgaaggaacaccatggagttctgttggaactgaaattcttcttcacacaaaatgcaaccagttctatgatatttgttaaagtccaaataatgttttctcctaaatctgttccctactaatgtagcagtagatttgagaaaaaccacaggagaaacaattaagatgaactcacactgagatcacctaatgcctgacacctaacgatgcctcacatgcttttctatttccagcagcgcttcatacttaaaatctttctctcttggttgttgtgttttctttctggtatcctgatcataagtataacggaagtattacaaaagcttagcttctaaaagaagggaacaaaagcagcagattctattggctcattggcttctgaagtatttgtggtgcatgctttttaaaatatttttataaaagaaagattgagaacgagaaaaaaaagtgaaagaaagatactaagtaaaggtgagtttactctagagcctcgtaatatgaaatataaagaagtaaacagtactctatggacttcaaaaacctggtgtgctgcatgtactatttcttttagaacttttataaaaagaaacaaaataggatgttttaacatataactcgtgttacatacttggagatcgaaggaggtagttttgaaactccaatcatttcatcatattggcctaccagtgaggcaatgttgctcacatttctgttagccaaatttacatcaatttgattatttagactatgttttctttttcttgtaataaatactgacaaacattaggagaatatgtacaatttatggttctataaattagctcattaaccaaagatgtggttggaaagatccttttgtgattattggcacagcaactacagcttgacaactagggattcttttgataaagtcttctcaaacaatggagcaaagaaatgacagtaccactcaggcaatttgtttccttctgtctctgtggcaaactacaaaaatcttggcttttcactgggaagagaatgtagtgataccaattactacgtaattacgggtttcaaaatctccttaacgtttagccacggttagaaaaggaaggaggagacacacatcccttgttttgttcttattatcagcttaaataagtcaggcagatttttcctgttattttaatatttatcagcatatgacaaagaggtgtgtttaaatagaaactttaaaggggaatgaaaaataactggctcagagcaaacagaattgagaactggagtgctgcttcaaaatatgatttttcatgatagtaagatcaggtttttatttctcagtactgaagttgaattcatgtatttcaattgaaatctaagataaaaggtacaagaaatctacatcaatttaaacagatttagcaacaacctagtttgctcagaaagcctgacttagataactgtattcttgtattggagcaattcagagagagagagagaaataccaaatcttaaaatgctttattattttgaacatataaatgagaaaaaatgcaatttattttaaaagctaattgtcagaaaccatggtaaattggtacatttacttttacaaattgattattaactgaaatattaaatggatacatcaaaggaaagctctccatttgaaatacccctcttcggccaggcatggtggctcatgcctgtaatcccaacactttgggaggccaaagcggacggatcacgaggtcaggagttcaagaccagcctgaccaatatggtgaaaccccatctctactaaaactacaaaaattagctgggtgtggtggcacgtgcctgttgtcccagctactcgggaggctgaggcaggagaatctcttgaacctgggaggcggaggttgcagtgagccgagatcgcaccactgaactcaagcccaggtgacagagcaagactccatctcaaaaaaaaaaaaaaaaaaaaaaaagaaagaaaaagaaaataaagaaagaaataccagaaatacccttcttctcactatccagccaaggttcttatcagctctcatggctcaatgcaaatgtccttactttgcaaagacatcttatttttttttaagttggcataattgctccttttttgtgctatggcaacaatttaattctctgatatactttaattcaaggcttcttgtgtgtctctcccattggagataaagctcttgaagacagggactgtgccttatctatctttttattactcatggtgctttcgcatagttattttcacatagtaagaacacagtaagtgttgaattgaccgggaaaactacataaaatttggggactttatgtgaagtaaaatacatataaaataaacttttaataatgagccaatatttttatctctattgctatgaaaattattcaaattgtgttttttcactgttaacaattagttattgcactgaagttaatagaggtttgaagcacactctataactgcttatatatgttagtgtgttcgtataggttttgaacaaaaagagtgaaatctaagaagttggcatttagcactttgaataagaaagccagagtagagcaatggagaatttcaagcccagaaagaacaacgaggaagccatatgctcccaggttgaggagaaagacgcagtaaatcctcctaggggtgtcgaaaatgccaatgttgtagtttaatgagcatctgaatttgtttcacattttgcctttcacaagcataaattccaggctctccctacatggtgctcaaggattgaaacagaaaggaaaaaatagaaaaagaaagaaaactccaaaataaggcaggaactcgaattctgtcacctgtacatattcacaacagaaaattgaagtaattctcaggatttcaggtcccaaaactatttgcaacaggaaaatggggtgcatgcatacacatgtgtgtgtgataattgtcgccttttttccattccatcctatcctttgctcttcaatagtaatcacacatatgtcatgacagtaagaatttactgaaaagataaattatcaagtgttcgctgtctttacaaaatgatttttttgctttatagaaggattggagaagcatccttttaatggctagcacatccgagtcatgtaaatgtgacttgatgtaaaataatatgtatcatgtatacaatattttagcagccaatttgatacataaggtggggtgctctctactaaatttctttttctaaaatttatcagtaaatttactgagcaggaacattaccactggtaacagatcagatgttatgaaaaacaccacagaagtctatgggtcactggaaatgacagcaaaccatagcaccaagatgactagggaatcactttgaggacttcaagccagattgctgcagatactaatgatatcaaagcctggatatccatagccttgatttatggtgattttcaacaccagtcaattagaatgcatttcaagaaaagactgtgttcagagaaatcgtatgagacatttcttttaatatgtgtctaggccattctggggaggaattggctttttaccaactgataaaacagaagaagaggctttctccttggaaacctatttctccatacaggttctgcccatagctttacttgattatgactatccctccggaggttcatgtgggtgtaccagatgcagggtctcttcaagtagtggacaagagggtcagtgagttatcttcgattttaaggaattcagaaagtcatgacattgattccgttctcattctttgccagaactttcaggacctgtgatgagacagggtctatatgtgcatgggtaaagggctctctgagaaccacagcaatagcctgagagcagtgctgcatcagatgactggaaatgaggcccagcacaagcagaacctttgcttggtttctacattaagcaagaactgtcaggcaggattacaacacttacggacaaataggaataaaatcaatcttgtgaccaaaggctctgaccagtcatgataaaggaaagattagagggaattataagaaaaaagaaaaaggaaagaaaagagataaaaaagaatggaaaaagaaaaagtcagaaatatcaaactatgttttcttccttattctgaattctgtgtgctgaattaatggaataattgccttaattactcgccttcagcgtttagacagcctgcatataaaatgatagcaaaaatgcaccagaaaagccccagttattttgagaataattttccaaatggttgttttgtaataattgcttttgtctaaaatagccctcttatgaaagtttaccccagagcatcaacactgagctgtttatattgatttgcagttatttcatacatatctaaaattaagtattggtactcgcaaaaacattaatacctcagctaaagtgcaaacgttaaaatgtttcccttaagcagatattgtcaaatataacaccctgcttattatggttatttcactagttcaaaattaatttgcaaatttagcataaatatttcttctctttgaatgaaaccgaggaggcctcatctaagttctcactagctgcctgaacagttgagtccgttccgtgttgactccacttcacatttttgtactgctgagaaacaacatccacccaccctccccttgaaagttggaatcatgcatgttagtaagtatttcagttatgctattgacgtcaatggagtcattaaatagattgctggccctcccagaggcaaatcgctgccagggacctagatacagacacgttttttacaaagacaaccatcaggttttgctatagcagtaagccagagaaagggaaaagtttatactgtagcagacctatctccaaacacagtttctttctttcttttgcattttagttccggcctttctttctctttggttacagtaggctcaagcagatacccagatactgttgcctgaatgttttgtgtgcaaaagcatctcctgtaattgagaccatgaagggaggtaccccacttttaaaaatgagtctcacattttgctctacacagcctatcttgatgttgacttggttgcataaattatttaggcaaatcactattgtctgccagtaaggtcgtgtttgatatatagttccctgaataaacagtctcctccaaacacacacacacttttgtactttctgccatccctgcgtggcatgtcgctgcatcccctcatctatgaatcaacctttttgcagctagcactgtgctgtagcatcagggatctgcagcaaagggtggaggaggaagctgggaagaaagcttcacttctctcagctgcctcatctgcagcgctcccacaggaggctgtccacgtgcctgtgtcctcccaaaccctagctgctgcctgcctcgagcctggtcatgcagctcccaggcatggcaggcagagccctttaggaaacatgtgcctctttctgggcattcttgacagctctatttacctgcacagccccaggagtcagagccagagattcgcctcacacatctggactcttccacctccaggatcgaagttagggagacatcttgagcagacagatttcttcaaatctggttgtcagaaactatcccattggttttagaacccatttctctcttcagtcctgtaccttcactccctggagacccccaacccccattacttatcagtaagtttgtatataaatgccagacatctgactacctctggtaaccccttttggttcatctggagacccaaattcattcacctacacaactgtccctttttctgtctttctgactttgagtagcatcttcatcatccacccttttatctccctcttcacctaccacagccaactcctttagtctttttctctaatctttttccttttctcccccacttcctctgcctttgtttattgttccatcatcctgtacctaaagcattgtggtggtcctccaacttgttattattgtcctcattctttccccactctaaaccagcttccattctggtactagaattctttttttttttttttttttttttttggagggacggagtctcactctgtcatcaggctggagtgcaatggcgcacaatcttggctcactgcaacctcagcctcccgggttcaagcgattttcctgcctcagcctcccatgtaactgggactacaggaccccaccaccgtgcccagctaattttttgtatttttagtagagacagggtttcaccatgttggccaagatggtctcaatctcttgaccttgtgatccgcccacctcagcctcccaaagtagaactattcttataaaccccagttatggttacattattttcttctttagctatactttgccttcaagataagacctaaatgtctcaccaggcatgcaaaagcctttagaattttgctctctttctttgtcctcatctcccactttacgctgccacccccctgcacaactgatggctgaagtgcactgaatatacatccctgaaatacaccaggatcttcttgctttcctgctttcatatatgctgtttcttctacctggttgccttttctccaaaatatcatttacatattcagctcagggattatttttcacattgtcactgtgaacaaattctatatatcatctgattcttggattcaggattaaaataaatatatagtctcaattcagggcctgggccctgatatatactatgtgcataggaaatactacttcctttacccatttccttctggaaagtgcattttaacccttcatcttcttgatataccttctgcaactcacccaaaattactgttaattattatctcaaaatctctgttattacacttgtcatactgtattgtaattatttcattttttcccattctaaactaaaagcatcccaagttcaaatactaatcctctttttctatatcctcaatttataacataaagcccgggacatagcaaatgctcaataaatgtttatggactgaacaaatagggatgaaataatgcccatgcctgaaccagataagattagaaaggaagtgaggctcatgttcagctttgttaaggcttactgaaatatctgctagctctcaggacatgtgcatagtgctgacatcccttgctaatcttgacaacgtgtgactttcaaggcacttgaagtgaactctttgttatccatcacttcaggaagaagtggcagtgttaaaagaaatggaagaaaaacaactaaatgaatttttatcatactatattgttctcttagtgcctggcattgtgcttgccacaaagtaggcactcaagtagcatattgaatggaattggtttgagaacccagttaatccttcagagaagttacttctctgagactcacttttcttgtctgaaaaatgggcattttttttttttttgagatagagtttcactcttgttgcccaggctagagagcaatggtacaatctcagctcactgcaacctctgcctgccaggttcaagtgagtctcctgcctcagcctcccaagtagctgggattacaggtatgcgtcacaacacccagctaatttttttttttttttatatatttttagtagagaaggagtttcaccatgttggtcaggctggtctcgaactcctgatctcaggtgatccaccctcctcggcctcccaaagtgctgggattacaggcatgagccactgcgcccagctgaaaatgggcattttaatattctatatgttaagattgttgtaagggctaaatgagaaaagctttatatagtgattaagagtgaagactctggagtcagactgcctctttcaaattccagccacaccactttgtgaccttgggacaaattgcttaacctctctgtgtcctaattgcctcgtctccaaaattaggatggaaattgtgtgttttggttgtaaggattaaatatgttaacatgtataaagcatgtagaaagtcccagtgttagtattggtgttattagtgttatataacatgactcagatagtactcagcacatagcaaaccaccaatgtgtggtagctaagatcccagccttctggtatcagtagagaaccacaacagaaagccctgttgagctctttctagaaggttctggtctactttgcttccataataataccatctgaagggagtaatttttgaagtttaagactttttttttcctcctgagactatagaaatcttgttatatagaaatagttttagagctgaaggtagagttctccagctcatacatgggaaagctgaaaagtcaggagggagaatggagctgacaccaaatataaagggacacccctaaatacagctttttctcttaaaagcagagtgcaaaaaaagattgtcaaattacttaggacttctggtaaaccaaatcttagttaactgaaagccctgtcttgcataagcctgacaggatgccactttatatgatagcatcattacagcttgtacagcacatcaaagttgtattgaaatacatgtttcagggttggtacacacctattcaggcataggtgttacaacccaggaagcttagcagggagtagcgctaggagctggtgcaaagcctccctttgcagagaggacaaaacccactagcagagtctgcaggaagggaagaggattggcccttttgggaaaaactttacaccctctccaattactgctgagaaggaaaaagcaacctcatacccatcttaacccattctcctctctttattggaagggagggagataaaaaaggaggttggagttagcctagagaagaatgaatatggaagtttgctaagagacaaggaaggaagaggaccaccgaagttcctttttctgcctcctgcttccccaagtgggtatgatcctgggggcagggtgaattctgcttgcttgcttctgatcaaccccgagccagcacattatgaagttgcctccagaactgttctcggaagccaggagcatttcagggaacagcctttcacccaagaggagggaaacaaagcagggactgtcccctcaaaatagagaacaggcaacagaactcactggatctttttcttggtttattgtcttgacttcctcccagtcagagctgttgacaagcaccaaaagcgaccccttggagttttctgtatttttcctaccccctgtctggctgtgtccacagagtaagctgggaccatggcgattatccagcttatttgaatcttacaggcagccaggtcagataatgctattttctctctgccccctcagttgtatttggggcttcaaatttctagggtctagtctggctagcactgctggtctaataaactagataatgtccaaagcccacatgtgtgcctctgatttcaggaaaggtaaggggctagtgcttattccatttctggtatgtgccaggcacagtgctagcccctttgaatatatcacgtcacctaattctccaaactaaacttctttgcgtatattattgcccctatttcacatatttggaaaaagaagattcaggaagtatgtggggctcactcaagaccacaaagttagtgatagaatcagaactgaaagctagatctgtatttcttgaaaacccatgctctttcctctgcagtctaaaccacactgtctctgcctccatcccactgtaaacctcagatgttatagcttatcaagaaggggatggggaaaatgtcatagcaagaaagcgaagtgactggactaccaacaaccttaataattattacatactagaggactttctttaatttctttctcatctatccattttattgtaagtagtaagcaaaggtgtaagtcttgagagaaatacatctcacacgtccattattcattcattaatgtatttaataaacgtgttaaattcatactgtatacaaggcactgtgttagccactgaggatgctgtgatgaagagaatgtattcagaccctgatctcatagatcttacggcccaggaaataatgcataaataaattcatgactatacacttgataattgtaatgaaggaaagtacagaatgctatgatattggctcactttttcacctgtaaaaatgggaataatactagtacttaccattagggttgcggcaatatctaaatgcgttattttacgtaaagcatttagaacacgcctggcacccagtagtatttagtgtttaactattatgatcattagttttatcactatttatcattatcatcattatcattagtctagtgttattattgttatcattctggggcctaaagtagattagaagataggaaagaactctataaataaatgactttaaactggagtcctgaacactgagtagctggggtagatcgaggggcggtggtcctgagagagtaaccaacacctcagagatgccacagccagagaactgggcactttgaacaacagtaagggacgcagccacagagactgagagatgccaggttaagcagaacatttgtaagtcatggtagacatgtagattttactgcaaattcagttgggagccattaaaagattttgagaaacagattgacgtgatctgatatgcattctatttattttattttattttattatttatttatttattttttgtttttgagacagagtcttgctctgttgtccaggctggagtgcagtggcacgatctcagctcaccacaacctccaccttgtgggttcaaccgattctcctgcctcagcctcccaagtagttgggactacaggtgtgcgccaccacgccaggctaatttttgtatttttagtagagatggggtttcactatgttagccaggctggtcttcaactcctaacctcgtgatctgcgtgcctcggcctcccaaagtgctgggattacaggcatgagccaccacgcccggccttatatgcattttaaatacacaacttctctttgagccccaagtctgggttagtgacatctcatacatgctcccagtacctgtattttctctgtaataatactcagctcctgccccttccatgtacctcctggttaagaagacaggctctgcagcaagactgcctgcacttagttctagttcaatacctttctttctctgtatgattgtagagaagtaattcaacatccctgggtcttgattttcttacatgtttaatggggataataatagaaccttctgcatagaattgttttaagagcaaaattaaaacacttagaacagtggctggcacacataaagcactaaataaatattagttgtttttaatatattgtaactgcctattttcttgactgtttatacactagactgtatgcttagttcctggcacaaggcaggtgttcaaaaatatttactgaaaaaagaatgaacaaggaaagagaggtagtgcaataaattgtaactaaaagaagagaaagattgctgtcctattcatgggaaaataggctttcttgaaactggggtatattctgataaggaggagcctgcttatggggccagagaaactgaatgactttgcagctgcccagctgctacagctttggggaacttgaaataacatccgtggaacaaaaatttgtttcagaatctgtgatgccaatctggactgccatctgcacaaaaagaaaactgggctcatgaaagagctttttcattctcttgggctatgtgactatctctctggaaagcaaatgcaaggctaaacctccggagttctccatttgctgcctttggaaggacagtctcaccaaaagagccagtcatcctactaagaacataacactatgacttccttttcatccctgcattgctaatagggcctcaaaggaacaagggctcagttctgtgaagtaaacacacacctttagtgtagtgaataaacactggaagaagcttttcacatatttgtaagctcggaagtcttttaggcattgagtagcagcagctcctttattgcttcatgcagctgcacggggtacctgcccggacaaacaatgaatccttcagctctctgaatgttccagttctgtgccgtgtgtgtgtgtgtatgtgtgtttgtgtgtgtgtgtggtgtgtgcatgcatacgtgcatgtgtgctggtttgttacttgtatatcccaggggaaaataagggttctttgcatgctttttgtcaacacaatgggtctctgttctcactgacctggttttcctttattccttccctctcatcacaagtttaggcagtctggctttcctcatccacagagcaaggccttcccctgatttacccctctctgcatgctcttcacacttccaaaccattttccatataggccccttaaatctaatttaaatacttccctctggaaagcctcaaatgatgagtcctgcctaattgctccctcctgtacatgtcctatgttgctttctaaaagcatcatagctctttatgtcatgggcataagttcttccttcattatttgtcaggtgtgtgtgcactccttaagctaaaattttatattatggcatctcactgagccaagaggaaggaggagtacttgtgtgaataagacctagactctgattgtgagtttaaaccgtttggaaataagaaataagatacattacttgaggccaggagttcaagaccagcctggccaacatagtgaaatcccgactctactaaaaatacaaaaaattagccagatgtggtggcacactcctgtaatcccagctgctcaggaggctgaggcaagagaatcgcttgaactcgggaagtggagattgcagtgagccaggattgcaccactgcactccagagcgagactctgtctcaaaaaaaaaaagtaagatacatcaagatagggactgtgtcagtcatggtcctctacagaaacagaatcagcagtaggacaatattcactttaagaatttggctcatgaaattatagtggttgacaagcttgaaatctatagagcagaaagtaaattcaggcagtaattaatgctgcagtcttcaggcacaatatgttcttttccaggaagccacagtttctgctcacaactgactgcacaaggcccaccaacatcatcgggggtaatctcctttactttaagtctattgattgtagatgttaaccacatctacaaaatacctttcacagccaacacctagatcaatattgattaaataacagggcactatagactagccaagtcagcacatacaactaattatcaaggacccatcaaccaacaaccccaaacacctgtctttggaattagactggaattatgcctagctcttctacaaacaagatgtataaaatccaggacaataaaaatttttgtattatttctgattgagtcttcacttcaaaacaaaataaaataatcattcatcctagctcacagaattgttttgaaaaccaaatgatagttcgaaagaccagaagcgcaagctattggtactttgaacaccttgacagtgcgcaagtagtggcagcacacctgttaaatattggtggccacacaaacacatcaccattctctctactgagcagacatgagagaagagaaaatcttgggcttttgctttacacgaatgccaatcaatttgtgcctagtatctggaacacacaactgattatcttaaactcaatggagggaaatatctttaaaagaagttaatttggaccagaaatatctcaggggaggtaggagtgaggttggagcattctttatgtacatttccacagagttgagtatgaaactttattccctgtaaaaacaaattggaaatttgaatgtgaatccaatttgccaggttatccttgagacgcccttccttctcacacctggatattaaaacttatctccatttccctgtgagtcttgtattcctgtcactaaaaattcctccagcctctttgcagagcacattggcaccaggcccccttctaaagccacaatgccgaagttctgattgcacctccgtattcctatgtttccggtaagtcttttaaagacatttggctcctgcctctggtcttgaatattttaggcctattgagtttagaatctagagaaaatagcagattaaatgtagctcaggaacaagagggtgttgtccagagaaagctgagagtgactggcacagcagacgtaaacatcgtcaccagggtgtacatagctttaactcaggtacctgcacgggcatcacaggcagcatggcacagatagttcacaggcctgggtatctatgcttatggactggccttccaagtgcagtttcctgctcactcttatttatcttctgataaagaattgctcccagcaaattactaaactaaacctactgctgatacttttactccagttgtaaaaacacattactccctctgcttctgcagaagtggaacatgcttctacaattcccttttctaaatttgttgatggattacttattgccccactcctcaagtttctgtggaggggattccatctaatctttaacagggaacagtttttgggaaatattaccttttctcccttctgtgctgcgagagcagagggcaaagacaagtaacagtgagtgggaattataggagaggtttttgcctcagtgagccttttaacccactagagatctggaagaaaatggagtgggtttctctgggaggtgatttgttctgcattcccttgctagaagatcacttgcctagacatatgtaggaagtttaacatgggttttcctcattcggaagaagggtggattcaatcacttctgagatttttcttgtgttaggagcatatatgatggaactgtgttttggtaaatcagtttcagttctacactgcccctaaagtattttgcttgttttcagaggtctgtccataaagcatttgtttcaaatacaaggcatgggggaggaggtgttatcacaatatcaaacccctgctaagtatcagattttctattaggtactctgcaaaggagatctgtttttatcctcaacaaccttctattaagtcaatatcattatcccattttttttaaccaataaaactatgcctccatgaatgtaactagtagtataaagacactcactcagcttgtaacagacagacctaggatcggaaccataaagacactcagctagtaagcagtagagttaggatgtgaacactgccttgtttggctcagaagcctgtgtacttggcatgagctctctgtgctgtccagtaagtaaaggtgcatgtgatgcccacacaggtacctgcgttgaaggtacgtacacccttgagatggtgtttacatctgtggttccaatcactctcagctgtctctgaacaataccaacttgttcttcagcaacatttaatctgtttttttttcctccagattctagaactagagagaatttagaagaaaatacatttcaagctttagttttccctcatgggaataactgagccaatagggaggtggcagtgtcttcctctcttctaggaataagtctccttccctgaaagacttttgggttttgagtaagccatcctggcagggaaaagaggcaggggagaatttttaggacgtaacagagctgtgggagacatatctccagtgcattactcactgcttaaaagacacccccagcctctgacatcacaaggagagagaattagatttcagatcagtagtgaaactgaggtgtgtcttgcttgaacacaaggaggcagccatccaactctaggctggctctggaaagtcccattttgaataatttgcttcttatgatgctttgttcagcttccctaccttaagtgaaactgtgtgacttaaatgaaagagcactgagctgaaactcaggaaacctaaatttcagtactggcaccaaccaggtgtgtaaccagaagtaaatcctttaacctttctagactcagtcatctttagtttaaattattttgagtctttgagtcttagaattcaatcttacttcagatttctataatggctcctggcccaaaaatagtggtgtgtgggtgttgacatggataattctttgtcacggaggaaacagcccctcagtaagaatctggaattcaagcctaggtctctttggtctaactccaaaacctaggcttcttccacctctcctaccctgacaagaggccatactattgtttcataacaaagtgtatctttattatttttataatccctgttagccttgtcattggcacagttcattagcaaacattcattgagtgcttatgagtgctgggaaaataaaaaggaaggggacatggtgcctgacctaagcttaaaagcattttcataaggagattctggagccacactgcctggatttagatcccagttctactatttttagactaatcatttcttaaactttctgcatacctcagttgcttcatcctcattttcttcatctttaaaattttcctcttagagttgttttaaggattaaatttgttgcttctgtaaaacatttaaaatagtgccaattatagaggaaagaccaaatacatcattgccgttattgttactattatatatatatgtgtatatatgtatatatatatgtatatatgtatgtcagtccccttgtgtcaggagtcttagaaggttgcaactgggtcttgtttgctggcacttaataaatgtttgttggatccaattattcaacacatatttacaatgtttctactatgcgcaaagccctctgatggatccttggtagaatccagaatttttacaactttttaaaaaattaccatgttttagagcttgcgtaagtataatttggaattttttttctctttcaatatttctcttctttctttttctgtggcccttgtatagaaagtattgaggaactgagaggaagatatctcacacatatgcttgctaacttaatcatatgagccatcctggaggaggtggggttaacaacacaccaaaaagaagattcttctctttcttaaatgataaatgtcttttagaactctgatgtcagacaagagagtactgcttacttttaatgggttttctgtgtcagagagagagaagggagagagagcgagagaaagagagagagagagattcattcaccactttctcattgactcattcattcaccctaaaagcacctggcgagtactcaccacaacatgaatcaggcattatgcctgggtaatgctggataatggagatacagaaatgaataaaacatggtttcttctttgggagagttaacagtcgtggggcagacaaacataacttgatttataacgcagtgtaataagaatttttcagaagcatgaataaagtgctctggaaggacacaggaaggcaggtagttgggagcaagatcctatcctaagtacaaataacactctgtactgagctgtacctaggaaatttataaattggattttattaaattttaaaaattagtatttcccatagctcggtcattcattatacgccaagtgttcagccatttcagctcaagttagcatattctttgagcacctattataaccaagtggattaggagactacatattaattctgaccatgactaggacaaggaaggtataagatatatgatttgaactctgccttaaagaatagatagtatttcataaggcaaagtgagaaatagtttttaagagggcagaccatgctcaaacaaatggaggccagccaggtgcagtggtgcatacctgtagttcgatctactcaggaggctgaggcaggaggattgcttgagcccaggagtttgaagctgtagtgcaccaagatcattgcagtgaataaccacttcactcctactgggcaacaaaacaagaccccatctcaaaaaaataaagtatgcagatgaaaaagtataggtttaattgcttagttattggaatgaaagtcaccctaggggattagtgaagaaaggatagggtgtagggatatgcaggacattagacaggaaagatggctgggcaaagaaaaaagggctttgcataccttccaagattttattttgtgtgcagcgaggagccactgatatttgttcatcagggaaatacattatcaaagcagtgcttcttgggatggttaatgtggttttggctacagtgacaggaagcagattcaggcttggaatcagaaaacataacagagattgatgaattgggattacttgtgtgatcttgagcaagttcataatcatttctgagctttagcctcctcatctatatagcaagcaagatgaaattacgacaagagcaacaatcacaacaacaatgtttattgatcattactctctgaatagcatggtggtagggcatttccttgtaatgtttaagcctcaaaacaactctgtgagttcttaaaaaggtaaacgtaaatttacccatatgacccaccaattccactcttagatatctacacaacacaaattgaagacgtatagtctttcaatatatgttccacaaagtcgaacacaaatgttattagcagcattatttatttgtttttaacttttgatttttaaaaatatatttagggggtacaagtgcaggcttcttacatgaatatattgcatagtgatgaagtctgtgggcctttattgtatccatcacccaaatagtgaacattgtacccattaagaaattttcaactctcacacccccttacccttccaccttttgtagtctccaacagccattatttcactctatatgtccatgtgtccactgtttaactcccacttataagtgaaaacatgcagtatttgattttctgtttctgagttaattcactgaggctagtggcctccagttccactcatgttgctgtgaaagataccatttcattatttttatggctgagtagtattccatggtatatatatcttagctgatcctgactcaagcagcagttgcccagacggattagaggagtgacaggaaccaagaaaagagctgtacaatgctgcaggcaggaagtaacaagagcttaccaaaggcactgtcaggaagaaagaaccaaaggtgttgacaatgaagccaaactagggtaaggctcctaattgtaccatattttaacttctctaaacaatcatttaggatgcttgattctatgaacaagagaagacaaagaatagaggacttcctttccttcagcaaacagctgacacactttcccatcataaacttcgtaattcaggatgtaaaaccagatccaacaaccaaacccagctagaaggttaaataaataagtgctaaataaataaacatgatttttcttttccttggcccatgagtctccatagaagatgccatgtgcttctggtaattgaagtctactagtcaattttcctttctttgtaaaattgggggaatggcctactcagggttataaactgaaactttgaggagttggaactttttgtatgttttgttttacattttctcgtcatgagccccatcattaatactaattatgaatcacaggtgagggagtgcacctaacatttcatcttttattttgaaatgctattaaaactcaaaaggcagaaacatagcctgtggccttggcagatgcaggactaggtgatttaatggggtttttcctgcattactttctatgactgatattttgtggtgcagatgtgactgccacattgtgaaacattattattaataaatccacattccccaaaacaaacaagacagcatggcaaacagtggtgtttgctctgtatacatttgggttggtttttcatcatttcctaggaccaaggccctgctgcttcccatcacattggtgaaaaatgtgagaattcacagtttgcctattttggcaacataaacatgggaaaacttgtggtcacagggtcaggactcttcgttctggagggcctggtagcaagtggatggggtcgtgagggagcttccttagggaggacaatattgaatctagaagttcacaagacttagcccatgtaataaagagaatattctgaataccctttaatattcagtctttcagtcactgtccccaaagagccaagaaaagctaatgtatgcccccccatggtaattaatgttcaagcttgaagaaacttgaagaaatcttaaacgtagcaacactaactgccaggtttgttagctgttataagaattcagccagtcacaacacattcaaaatgccattattagacactgactatgtgtgtagcagggttctaaattacagtcccagtcctcagagggattatagtgaatgcaggtggggataatatttaaatgtgacacatttacatattaactaacaattaaagtggatggtggttttcttctcagtgaagactttcagagctgtcctgcccccacaactggcgagtggagcctccatcttcgaatccaaacaattcgatctcactctattagagataatagaaaggtcatgagttttgacatcagaaactcacaagtcttaatcacacattgcctgtgtattaggtggattgtaaactccctgagggcaaagtctgtttaaacactgcgtatctcagaacccagcacagtgcccaacatttagtaggcactccacaaatatttgatgttgaacacataaaattagctgtaatcctagcaaagttaacttctgagtccagcgttcctcttggtgaaacaggaggaatcacacctgctttaaaggagctgagaggttgactagaacggagggtgaggaggaagactccagactttccttgcctgggcccaaattctggcctggcaatcattagctctgtgattttgagcaaataacttgtctttgcctctgtttcccacaccagcaaataaggacaataatatcgcctacgttttaggctaggcatagtggctcatggatttttggaggctgaggtgggaggatttcttgaggccaggagtttgagagcagcctgggcaacataacaagaccttatacctacaaaacaaaactttataaaagtagctgagcatggtggtgtgtacttgtaagtcctagctacttgggaggctgaggcaggaggatgacttgagtccaggagttggagatggcagtgagctatgattgtgccactgcactccagcctgggtgacagagtaagaccctgtctctaaaaaaacaaaacaaaaaactgtattagcccattattgcattgccgtaaagaaataccaaaggttaggtaatttataaagaaaagaggtttcgttgactcacagttctgtatgatggcctacaggaagcataataatgtcatctgcttggcttctggggatacctgaggaaacttaacagtcatggcagaaggtgaaggggaagcaggcatgacacacagccagagcaggggcaagagagagagggcaaggtgccacacttttaaatagccagatcttatgagaaatcactcactaccgcaaacacaccaccaagggaatggtgctaaaccattgatgagaaaaccaaccacatgattcagtcactttcaaccaggccccacctccaacactgaggattacattccaacctgagagttaggtgggacatccaaaccatatcacaaacctactttttcagtttgttatgaggattaaatgaatatttgtatagttcttagactagggcctggtacatagtgtgttctatgaaaatagttttaaaatgccttatatagcctgctacaaatgacgctgaataaatgttaaagaacgtgaagtttgacccccatttcctaaactagcgcctggcttactataaatacacagaatggaatataattattaattgggtgttacaggttttctgaagctcaagctagaaatatgggtttgtgggctagaaatatggggaagagcttcatcaaggacaaggaacaaaattgtaccttagtggaattaaatggcagtgataaggagttcacagagaaggcatataatctgcaaaagctggaggaaagaaggatcaggtcacagtcacaagatgctccaccatcagcaggacttggcaccagtttctgggagaataatttgtcatgatccagctttttaagtgagcttgaccaaagctctgctttagttctgtggtttcaactgcacagattaatactttgatggctgcttgtttattcatttatttattgaggaagtatttatgtagattctactatgtgccagacattttgctaggcagtggtgaataaaatagaaatggaagactgggcaacatatacctgggtctacaaaacaataaaaataaaaataaaatagccaggggcagtgacacatgcctgtgatctcagcctctcaggaggctgaggcaggaggatcccttgagcccagtagttagaggctacaatgagccatgatggtgtctctgctttccaacctgagtgacagagcaagacctgtctcaagaaagaaaaaaagaaaagaaatggacttcctctcttttggaccaggagggagagacagactataaacaggaaaataaatagattttgataagtgcttcaaaggatattaaaagggcacggtattgctcagatggaaaaatgggaaaaggtctgtccaaggaggtgatatttctatggaatctagaaagataagaaggaaaaaggagactattccaggatgggaaacataatattcaaaggtcttgagaaaggtatatttgagaaagaaggccggtgtggctggaacagagtgagctaggagtgagtggtgaaaaatggggttggtggcatatagacagggccaggtctcgcaggatcttgtaggtggtggtaagctatttggattatattaaagcaaattgggcagccactgaaaaaaatggagaagagaaaatgttatatatatatatatatatttttaaaaatgtaactcagatttcaatgtgtaataaattggattggaaagagaggatatgaggggaatgttgaagaagtctgagcaagaggtgatgcttgcctaatcaagaatggtagcaggaggaagtgagggaagtggaccgatgtgtaatatattctgtaggtgaaatagataagatgatgctgataaattagatggggagggactgaaagtagaaatagtaagggagagaaaagattcaagaatgaaatccaggcttctggcttgaaccactgagtgagtattaatgccaatgactaagttgaaaatgttaaaagagggaacattgaaaggtggattgaggaaaaactcaggagtttggttttagatgttaattttcagtgatctgatgtagccaagaagagatatcaacacagcagagaaaagattaggcagagagataagttttaagagttgcacagatctagaaggggtgaagggcagtgggacccagaaagcaggttgaggtgttggcctttgttaacagcagggacacctggtgaaagaagaagaagggaagatgtgggtgtaagtggaggtgataatcatcatcaccatagcttatatttattgatgtgtaccaggtaatgttctaagtaagtttcatttattaactcaatcctcttagtaaccttatgagtaggtttgtacgtacactgtatcaaaactgagagagtctcatctgatggtctacattgtggaaggggagtcaagagggacatttgaggagagaagctaggacacagttgggatagaaagtattcagtggaacttccaggcaagactgagagttcctctgagattttaaattatgaatataaagtgaatctaacccaaaatgcaaatggattttccacagcattcagcaatcagacttcagtggcctgacttaattggtgcttcatgtggaagcagggataatttccaatgccaggagtaataatcaagtacactattatcccttactagtatgctagcactttatgtactttcatgaagctgccttggggacttggccacaagaaaccttccacccaccaggctacccctcaatccctgctcagaagcagaaaccatggctccatgaaagaataatatctagagtgaactacaaccactcatcagaaggatgaagaaattgatggctgactttaagcctcaattctggaagaggtccaaactggatgctttgtcttctacctcacagctttccaggttcctctcagtgaccagggtacctcctctacctaagaaatcaccatcagctctccccactgccaagagctcataaatgaagaagggatgcaaaatctttacttgacacagaaagctttaggttgacaacaaatagcaatagctaacatttactgagcatgtcttttatatcaggctgtgggctaagtgcttttatatgtagtatttcccttcatctttaaaacaaaccagtgagataggaatccttatgatctcatactacagataagaaaagtgagctttagggaggttaaataatttttctcagaccaagaagctaacaagcagagcagccaagagtggaatccaggcagtctgactctagatactaggctcttttaacaagtacagtataatggcaaatcagccaacatctctgctggatcaagctgttgtatatatccatttgttgtcacatgttgtcacctttctatagatgttacttagaaaacaaatggattttatttccaactatatttagaccggtttctactctcccatgttctcaaaatgagacactaattgtgggggaattatggaattaatagattttattatttccctcttttgaaagcaaacatcctgttacagagtcaagtttatggtttgttggttttttgcaagcctggtgacctatgttaagagaatttcccctgaagtcaaatgtgctgacacatgtgacagcataagctgcactccatgggctccaaggactggcaataatgacctgtttttttttcccaccatgtaattatgaattgagatttgacttttaaaacaaattcccagataattgaggtcaatatgaaaattttagtttcaatatccgagtatcttaactgtgtagattatttgtgagtatactgataataagctccttatgttgtcctacttttaggtggttgtagcctgtgaattgtttttttcataaatgagggatatatggatttgcatggagccattcacgcattctgcacataattagagccaaatggtactcattaagattgaacatgagatgttaatttccattagcgcctggggaatctgcatttttaaataaagccccagatgattcttgtataaatcgaagtttaagaaacattgaatagatgtgctctaattgtttgatttattttctcttcttttcctattaaggataagaaaaattaaatgacctttaacaggcttgactatcactacaatagtaataatagccaatagttggtgaatgtttatctttgctgaatagtgttttatatatctatttcatatgtaacacattcttaggcagagattatcattagccccattttgaagataaaaaacaatgagatggagagagtctaagcaacccaagatctcatagctactgagtggcaaagcgagggtttagaattatacttttgcctttgaaggccaagtcattatctggagacagataacaatggatataaatcacagctttgctacttaccagcttgaaagatgagtttaataatactgactttgcatggttattgtaaaaatgacagaataatgcatataaagcaccaagtatatgcctgccaagtagtagatactcattaaatggtggctattaaatgtcagctggaaagttgaacaggtattccatgattttgatcactgtaatcagtgaacacacgtaatccaaatacctgcctacatatcgtacactgttcttattgttttaactctccaaattatttacataattatctctacctcctccttcccactatctctttagatatgatctgtgcctaagactccctaagacactaattctacatgatttgaaaagtaacataaatacttctattgtttttctatcctaaggaagtttgaatgaatttaagatattttccaatgactttagtacgaatgtttgcaaagggccagagctccctggaagtaagttgaaaaacaaacccagctgtaatagcctggtgacccagcagcccagacctgccattataacccatttggggattgcatggtaattgggtccatggcatttggcttagtggttctgattgtgacacatgatgattcaagtttattcatggacacactaaagcatcacaaaatgaccttttttgaggtccttgaggtcaggcggggagggagggagaagcactggggcactctaaacaaagcagctttgtttttacaccgcttgcttggacaagtgtctcctcacgtgcagcagtcatttgctgtggagctcttggcagagtaactaaaatgtgacagaaatgaagggcaaattctgaaatcccctggaaaatcaccctcccaagcaaatatttgccgtggtattgtagctcgatgacttattttttgtcattcactttttttggctcattcctttcctttatggccatttaaaaggtgggtaaactgaatatttattgagcatctactatgtgcattgcatgtaccgtactgagtttatggaagatagagtctgagctgaaatcatttaccatctctagaattcatcctccgtgtctgcaaaatggggatttgggcttcatcagtgattcccaagttagtttatagtttattaaaccatattcagcaagtgattcccaagttagttacatagtttattaaagcatattcaacattgcatcttctatttaaaacacacacacaaaatcttcagaaaaatctttagaaaccaagaaaataaactttaacaaaatcttctcagccaatagacatacaaaaagcatagaatctcaacaaaagggccacctgaatctgcataaaggctaggtatgtgattttgttgttgttgttctcaaccatataaaactggttgagaactccagatcagataatctctaagatttatctcaggttcaaaaagctctgtggccggacatggtggctcatgcctgtaatcccagcactttgggaggccaagctgggcaagtcccctgaaatcaggagttcctgaccagcctggccaacatggtgaaacctcatctctactaaaaatacaaaaattagccaggtgtggtggcaggtgcctgtaatcccagctactcaggaggctgaggcaggagaatcacttgaacccaggaggcggtggttgcagtgagccaagattgcaccattgcactccaccctgggtgacacagcaatactccgtctcaattaaaattaaaaaaaaaaatctgtgattttatttgggcttctctcaacaaagttggtgtttttgtagctcagagaagatatatctagcattagagaaggataaatcattatggcttaagagataatcagtcatttctaatatcaacttctgattgtttattcatggacatatgtatgtgctgacccacaaaacacaattttctaattgattctactgatattggccatcaaatctaattaatttagacccaaagtgaatttttttggttttctaaagtcagtcttcactatcttcgtagcccaaattagccaaataatttaggtaagaagtatttattctaccatttctatcaggtttctctctgatgcctgtgctttgcaaacaggtcagtaaaagagataaaagaaataagcaataaatcttaagtttttttcttgtctatctgtattttatctgtatttttttgttatattagctattttttttattaattcagtatgttccagcaaaagaggagaaaaaaacacacagtaaagggaaaatcaaagaggagagacacggttaagagactgactacattaaaagagaaaggggaggaatgaaatccaaaaagaattttcagggaaaatctctcagtaaaagaaaaaaagagaaagatattgcataggatgtgtttcatgactcatgcctggctctgtacctgagtgattcatttggtggaaaacatagctggctcagagaacctttcacaggccccagactttgttgaaatcatttgaagcttcattttgtgtgtatattttcctcacttctttaaaactgaaatattaattgcttatgagaaataggccctgatcattggagtttatgtgtatggccacttgagatttagaagtagatcagggacttcgaagtaggggaagtgtttaagaacctgggacaggtttgttcctagtggcttttctttatctcccagcaggaataaatagtaggtccaagggaatcctgttggatagagttcaaaggggacaggcccttggtaggggcagactagattagtggctttcaaacttttttgatcatgactcacaataaaacatatattttacattaagactcagccccacatgtctgtgtgttttgtgaaataatacttacctttactatatatgctttacttgatattttctattctattatattttattccattctattctttttgttttgttttgttttttgttttctgacggagtctcactctgtcatgagtgcagtagtgcaatctcggctcacttcaacatccactgcccaggttcaaacaattctcctggctcagcctctcatgtagctacaactacaggtgcataccaccatgcctggctaatttttgtattttcagtagagacagggtttcaccatgttggccaggctggtcttgaactcttgacctgaagtgatcctcccatttcaaagtgctgggattacaggagtgagccgctgtgcccggctcccattcttttcttttgttgttttaaataaatgctggcaaagacctattaaaaatatttcacagctcagtagtagatttctatgtacaactttccagtttctgtcctctctgcagcaccctctaaacacacacattgttaaaatacagcacaatatagccaattttcaggaacatctctctggcactccatccttcacactaaaatacttgcaacttctcgaacaccatactgtctttcacttccttcacgtgtcgccctctctgctcagtgcacttgagtactttcccactccaattcccctttgttcatcaggctaatgcccgctggtttagacccaattcagaggtcaacgtctcttattagggctgtttgttttctgcactctcctgagcatccggggcttatctttatctcagccttatcatgctgtgttatgatgacccatttatatgtttttctttcccactagacttattggtggcaaaaactatgtcttatttgatatccacaggacctggcctaatgcttggcacatacctgattaataaattctggatgaatgagacctacatactggtaggcacgtgatagggagtgggctgacttcttggtaaactgtagtctgtttacgataaacaagaaagcatacttttatggagaatgctcagcttcttttagttgatgtgctgaccctcattgcaattctttttctgttgccaataggagataatgtagcaaagtagctatgaagtcagactgaggagctgcacagaactggatttgacttctggctcatcagttactagctttgtgaccttaggcatgttacttaattcttttaaatctcaggttcctcatttgcaaaataggaataataaccttctgtggctgtggttaggattgtgtgagtgttattaaataatggcatatgagctccatgaggtcaggatttttgtcacttcagttcattgtcatgaacttagaagagaggctggcgcatatttgttgaatcaatgaatattttgtacataatagaccatcaataattcatagcagctcttattcatgtgaatttttcaccaactcttacacgaaattttttggagtatgtatgatgtgcataataattctgtatcccttctttagtcagaagttagggacccacctgtgaggtgacccttccagagcctcaaattcagtgacacaagatgcatgtagaaacagttgcctttcgaaagaagttgttttcaggctagaaattaagtttaatcattccaaggctgtttgattctgtggaagttctacagttctgtttttgagtcatcgcccatcggcatttgactcttcgtgtctcttttcatacatctcttagccatatcaccatttgctgaatattagactcacacagattcagattcagagtctcgggggaaaatgattgcatttctaagtgttcttggaactgtttcacttgcttcctcgacagatatcttgtgtaaggtccataaggatagaaaatccattattacctaagaccctttactgtttcccatttcatgaatagatgtttgtatttcaggttttcacttgggtctttcccatgttcagtacttttataagtaacttattgtgctacaacgaaggtattgttttaggcttttttgaatttcatcagcatgcagacatccctacgtactatatttctacaaaaaacccacaaactttaaaaagtaattcccaaactcttaaagaagccaggccaaataaaaggatggcattgctttatttctatggcatattgaaacagtaagaatgaaaagagatcctcaagagagcggttttaccttgcttttactttctcatgcatttatccaaaaagtcctttttattatattattcattatatattattcattgcagctcactcctcagataattaacccacttctatgataataatgttactccattcataaggactctgccccttaaaggtgctacctctcaacactattgattggggattaagtttccaacacatgtgctttgggggacacattcaaagcaccagagggcctggtctaatgattaggagtaatcattagaatggtgtaattcatcatggtgtaggtagtaaagttaaatgatccaatttattagtccattattcattcattagtccattatggttgcttaccttacatatgactaggttggtgaacaaggttgtcctattacttatcctattatatgtaaaagtctgcccaaagctgttttaatcatttgtatgaatgtaggtaccatttcaaagtgcactccttatcataaactcttgagatacatactaagatgatataaaagagagtggcaaatcctatagcactgtgctaatttaataacttacaaagttcatcaatagaacaatatacttttgttctcatgctgactcttgttctcaagttgaagattactccaaagtcactatagtcatattatgctgtctggggctcttcattgaaattttgaaaataggaggaggagcatatccagtggtgaaagagaaaacattttggtaagtggaaatgggagaaaaggaagcttgcctgactacctaataggccttacttagttgcttcagtgatggggacctagtagaccacagaagggccaagctgtctggaaaagagaagggttgtcatttctggaacccctactatgtgccagatacttcatgggtcttttacatctttaagttgaacctatgggggattttattgcattcgttttaaagataagttaactgctgtccatttaaaaaagtaagtacagttgctttgcaagatcacacaacttttatggggcagggcctgggcttgagtccaagacttcaaagcttgtgttctttccactagccacctactctcagaatgctcctgttaaacccattatgtggcaagtcaggtatgtgttgcacttgacatcttttttagttttccacttgtacaaacattccctgaaaaattgtggagaggttccatacagtggaacttgagatttcatctactcagccttctaccctgaaaggttcctctgagctcatcactgtaacctgaaatgtctttcacatggatctgaaaacatttagtgaagtagaaagtactgtgctcatagtagtcattctgtggtacctttttttcctttttaaaaaaaggaaaaagtttagttgacaccaaatagttgtatatatttgtgggatacagagtgatatttttatatatgtatacactgcataatgatcaaatcagagtaattagcatattcatcaccttaaacatttatcatttctttgtgttgggaacattcaaaatcctctcttctagctttgaacgtatacaataaattgttattaactatatttaccccatagtgcaatagaaaactacaacttattcttcctatctagctctaattttgtattccttacccaaactctctgtcttcctcttcccactaatcttcctagcttctaataaccataattctactctctattatgagctcaatgttttttagcctccagatattagtgaaacttgcagtatttgtctttctgtacctgacttattttacttaatgtcctccaagctcatccatgttgctgcaaatgacagaatttcattccttttcatgagtgaatagcattccattattatatgccatatttcctttatccattcatttgctgatggacatttaggctaattccatatcttggctattgtcaatagtgctgcaataaacgtggggtgcagatatctctccaatacattgatttattttcccttggataaatacccagtagtgggatcactgtaatatggtaattctatttaagctttgttgcaaaacctccataccgttttccataatagctgtgctaacttactttcccatcaacagtttataagagtttgctttcctccacatccttgctggcttttgttattttttatctttctgataatggccaaaagcttttagcttttcctcactcattgtgacattagctgtgtgtttgcctgttttgtgttgaggtttgtaccttctatgcctaatgtgttgagagtttttatcattaagggaaattgaattttatcaaatgcttttttctgcctttatttgtaggactttttagtaacaaatttcattatagaatgtaaatattataaggaaaaaatatatgttataatatgaattaataatggcatgaatattaaaaccaaacaaaatgcatattggaaaaattggcactattgcacaaacacagacatctaggggaatgtctttctctctggtgttcgtgtttttaccttcttcagccatgtgaaaagactttcaaaggttctattttattctcagagttgacagactcacccttcaacagagtgggcatcaaaagccaatagctgccttgagtaaattaatttttgttgattttagttcccctttaagacttcctgagatactgatcatggaaatgaatattagcgatttaattctggcacctcgtcaggactcacactgcattcctgggtgcagcctggaacatcactgctggctggactcacttctccttgcccaccaagggacctgaaaaccacattaaggtggagaggagagtgtggcacctccttgctcagagatcggccagttcactgtactttattgactgtggactgttgatttatccagccttctcatttcacatgtgagggagggcgatttggagtgacttctgtgcacttacatagctgataatagaggatggaccagaatccacatctccaactaccagtccagaattctttccattccccagtcactcacttattcatacattcatctaacatttattggatgcctacagtgtgtgtatagctgtgactacaaagatgaattggacgcagaccctgaactcaagatctttaccctggcttgtgtttttgatttcccagagggtctgaggtccattaggaaggtgactatctgccagggcagtctctccatgccggctggattaggcaatcactgctggccgtatgcagtcccgttttcagtgtccaagtctattcttcatagatggcctattctctgtttttctgactttcttactggggtttctcacccaaacatagcattactgataaataatatttaagtggctgagctctgaagattaagctattaatatcacaaacaggctccatattctctctagtaaagagcgaaaaagagtcagtatgtatgtgtgtgtgtgtttacacatatgagcatgcggtgtggctctctgagacacttagaagaaaagttcctgcgtgctcatgaaaggcccatagtacagctatgagtatattccaggcctcacatggctgcagtattcaccagattaccaatattagagaagcagatttttttctatgggtaatttttaataatttaagggctctcatttctcattatttcagaaatccaacttggagcttctcatttgatcagcaagtattttccaagggcctcctgtattctcagccctgtaagaggtttgggccttggaggctgagtcagagatcatgatattcaaaccgttttcactttcattttgttgttgtcattttctctccatttgatcctgaggtaaaaaaggactagtaatattatctctatgtcacagaggaggaaccagaggcacagagaggcttaatgacttgccaggaccctcaaggctataagcaggaaagcaggggcgagaccaccaggcttcttaccgctaggacaatgcttttttttttttctaactatgccagattgccagtccatattttttttaattcaggaaggattagagaaaaaatattgcaagcatataaatgtaatctcatgatagaatagtaacaattacataaaaatactaaagttcattttaaatactacctaaactaggtcatgaattcatcctatagctttttctcccagcaggcataattgagttgctttcccaaatgccaggttattctacccatgcgagttataaagacctttttcttgaagggattactgctgaacttctcctaagtcatgactttgtgatgggagagatataagtaacatgttcgttgggcttttataactctagagaaagctcttcctaaatcttggagcttactgctcagccaacttattgactttgtttaggaggtggccattagcctctcaaaccacagaggtttggactgttcaactacagtaagcccagaagcaaagagagattagaacacagcatcactgggtgaaaatggggaaagctaaactgcttcgaaattgcagtgctctgtcctatactcatttctggaggaatcaagaagagcctgaagcagaagtgacccactggccttggagacaggaggcaatggaaaagcacagttcatccacaaaccagcctctctgagcatcagcttcctagctgcgtgacattcccaagactcttccctgcactaatttccacatttataaaaaagaaccacagatgtgtccttgatggtcatcttactgtcatctgttaccaccacatacgctgtcttgttatgtggcttgggaaaatctataaactggtcttttggctttgatcacctgattgatttactgtcagcagatgatattaaaattagctttcatttgttgagcaaatctggatgggcaattgaggtggaaacagggagtggcctgggtggtggctggaattagaatagtaatctcttgtgttttagaggttacaaagcactttcccacatgtagtctcattgaattactacaaagtcctgcaagggctggtattcttaacctcatcagacaaatgagaaattgatgttccgaaagataaagtgactggtcagcattcacaaaaagatttggtggcagtacaaaaagtggaataaaagcaaaagctcttgcttgctttctggtgcaacacatcagagattgattagaatctactataaggctttttggctatgctgagatgatcgacaattaattataaaacactgtcaacatagacactggtgctcttctctttctgggctttcatacctgctcttcttgaggtttccctccccaacctctatctgtgtgtaactccttcagtttatcacttggaaaccacttcctctaagaagacccaagaccttgctagatgcccatcctatgggtttccatggcatccaaatattacccacactctgttcataccactctaattcaattgcctgtgttggaatatagctccatttaggcactaagaatacttattcacgagtcattcatgagtggttattttttcaccattgtaaccacaacaccttgaacagtagaccctggataaacatttcttgagaaaatgttgcctgatctgctgtagccaagaggaagttttgcttccacattgccctcagggctgggagggaattagaatctcttcccctaccctcctgctttattaaggtataatggacaaataaaaattatatatatttatggtgtatagcatgatgtttatatatatatgtgtgtgtgtgtatatatatatatatatacacacacacagtgaaatgattaaatcaagcttgttaatataatctgtcacctcatagactttttgtttatggtaagaacatttaagatctactctctcagcaattttcaagcatacaataccttattgttagctaaagtcaccgtgctgtgcaatagatttccatagcttattcctcctaacagaaactttgtaccctttgaccaatctttaaagccatccaagacagtaccatttccagaaggaggctcttaggaatccaaagaaaccaaactctagctatttgcataaaatgttagatcattcccagaagtaagccttagagttgagagagtactagaagtgtgacaaggatggaggttagcatttgtgtatccttatgggaaaacaggtaagagcggatatttttggagttactgggaaacttaaccatgacacttggcctgcttatgtgtctggtattattgctgggaaccaagcttcatgccaaacctctagctatcagatgtcagttttgggaagagacttgaacttgcttatgtggttatttataacagtagttttctattttgtgtcaggttagaagacaccatcacaccactgaaatatgttatcagaaccacatgcagatagaatatcgtaaatatggtagatgatgagcaagacctaggactcacaattcaggaagatacagaacccagcatttaacctagtacctacatgtacaaaatcctttcaggtatttaggagttaataagcatattaatataatcatcctacaaaatgaatttgtccaatcttgtcagtgaggtcatttctgcaaaattttaaagggcttgtagagtttgacaagagataaacattacaggcattgtgctgaattttcagcaaaagcagtcataggcaatataaaacaaaagagcacgactgggttctaataaaactttatttacaaaactaagaagtggaccaccatgtttgctacatcacggttttctgaccctggtaaaaatacacctatcaattcccatttttactctttcatttccttctggaaatctttcctatgttctccatcatccataagctaaagcctaaactccttaactctgctctgatctgaacagtccctcatatttagtggtccttttcctctctttgtgctcaagtcacatttttccatgcggataatgccattctcaatgctttctacttagtccaattctacccatcctttaaggtagatgtcttcaaatgacatagaggggtcatatcagaatcatctgggaagccttttgacaataaacacagtgctcctctcccacactaaattctcgtagacccagtgaggagaatggggaaagcagggacatacagggttggaaaatgtccctcgccttattcaagaaattctcaccttcttttaaaactactgctataggacattactaaaatccacttcctccaagaagctctccctgatcacataaacccatactcagcttttctttctgtggacctcctcagtcctcaatgctcacaaaattcattttaacacctagagtattatttggctatttaagcttttcctgtgccaggcactgttataggtactggtgtacagcagtgaacatgacagtgaatgcccttctctcagaagatgacactctaatgacttgaagagacagacaagtccatgtgcccaaaagagtgaaaagataatttcagacaatggaaacaagataatgggataaggagtgactggaaagcaaagcgtaagggatggttggagggataaggaagtgctgttttagataaagaggccaggaaaagcttaagaagtctgtaattgagcttaaaatcaaaatgcaaaaacccagaggaaaagaactgcaggcagagggaatagcacagttttatctttcccttctgtgaaaatcctattgaatatagaatgttggagaagcaagactcatagagatatgaaaaatagtcttcttatttagggttgttagataaaatatgggatgcctagttaaatttgaatttcagataaacaacaggtaatttttttagtagaaagactgattgtagtataataactgaaaaaaagtattatctgaaatttaaatttaactgggtgtctggtttgtttgtttgttttgggttaaacctgacaagcctacattttattcataggaaaaaggtggaccagggtgatttgtgtctaatatcctccagctcctttaaagctgtactgagacaaaatccgaatctaagcagaagcaatttaatttggtgttgctatttcagaagatcttatattgttttctgactgtctcattggatagtaatttgtcttcctggtaactccttaataacagattccctatgactttttaaaaatcatatactaagttcaatattaagtaattaatttattcttttatccttcatctatcacaagccagtaataatagtactttcctgaataaaaggtgacaggcctccattctcaagtatagtaggagaaattagcagacataactcatttaaaatcagcttggatcatgacaaagggccgcagcagaggcacccaatagactgcgtttctgagtagggagatccagcatgggaatcaaggaagcctgatgtaggccttgatcaatggcaagaatttcaataagggattatagaagacatcatccaggaaaaatagatcaaagacaatgtgctgaaaataacagaacttgtattggtaataagtccgtctctgtggttgaaacagagaatagctaaatgataagagcatgagatgttagacctgggttttcacaaaccctgtacaccaaattaagggattttatttgttgtctttatttgatacctttgaaaacttgtggacgtctaaatatttttgagctggcacttgatgtaaaaagggtcacaaatgaagaaaagcaatctgatgcggtgtaaaaacatggagaccagtaagagagtgactgcagaagtcctagttattcaaatgaagactcaactctaatttataataagacaaaaggaaagagggcactgaatgcaatagatatttttgagatagaaactccggagcctgccaactggtgggttgtagaagttgagagaaatggaggaattgaagataaagctgagattttaaatcaacgtgactgggagaaagacggtgccattcacaaaagtatggaaaacctagggagattggtagattgtaggtggagaagacttaatcatttttaaatattgcattatagaatgtatagctataaagagcatcatgataatgcccaatccctttgtttcatgtagaagaaaatccagtgggagtaagtaacttgcctgtgatcactcagtaagttagtgaaatagccagttctggaaatctgatgccctattttccctaaacagtgtttcattcataagatgggctgtcttatgatgagtttatagaagtagaataattgtgtggtgctgtgcagtgatcagttggaaatacagatgtggcacttttgtaaaagatcggggacaatgatttgggaggcatctaaatgaaaataacatttgaaggtgcgaaaacaaatgtggtagccgaaatagacgtagtgcatttaagtcaaatgtgacagatgacaatggggactaagaagaagtctccactgaatttcacatttagaaggccattgggatgagagagaaagagagggagagagagacagagacagagacagtgcagagtgaggagctggtgcagaagtggaaacaaaatttaaaattatttttctggaagctgacagtaaaatgagaaagatagaatatcattgaagcagggcctaaagaaaagctttcaggttgttgttggataggagaaaaataaatgcacatgtaggtagaagcaatgaaagccatggagagcaagagggtaaagatgtaaatgagtgaggatagtactgaaattggtgaggtcctgcaagaaactagaggagacagaggagcaggaaccaggaggacactgaagcagatggttaaaagcggagatagagaagcctccacagcacaaagtggtgaagtggatggaattcaaattgacctttatctcatcagtgaggtagaaagttgtgttcttggttaaaagttagaggatagaagtgggaatgggaatttgtgaatagtggaaatgtcttgacataatgactgtggagaatcagtagagagatgtaaacccagattgagggccttgctgagggtaaagtagtgcatttgtggtagacctaatcaatctagtttctatgctgttcaactatggaagcagaagagaaaatatgaacaatgggagatttccaggaattttcaggtggtggtgagtaccggtttttttgttgttgctgttgttattgttgtttttaaattactgttgatggaattaatgttaggtaaagagtcaagcagactgggcaaatgtctgcttgccatttgctgaatgaaggagttaagtcgagggccaaggtcaggttctcaagggtgcttttgtgccaggctttagctgcatgttgcacacattatttttttatccttgtgataataggaaaaattagataaatcataaacttatgaggtaaccattactaccccaaatttacagatagagatcctgaaactaagattgagtgaactgtgtacaaaaagacccacaggagtaaatggcagaactttttcaaaccctgccttgccgttgcctccagtagccaggaaggaaatgcaaaattgggcagataaggtagctgaggtcagatgaggaatttcagaaatagagatggaacacttcctaatgataagctccaaagtgaagcagtggtgacagaggaagaatcaaaatgctggttatagatgtcaaggtgcaaggaattagagagttcatggatttttttccggaaacttattattgaagtatcatatgcagagagaaaagtgcacaaatcacaaatgtagaaatcagtgatttttaataaaatgaacatacctatgtaaccactacccagaccaaaagaacagataactgccaattccatagaaggcccctggaagtccctcctagtcactaaaccccaaaggtaattaccatcttgacatcttggcttaatatcaaagattagtgtttgtctctttggagctttgtattaatggaatcatactatttaatgtactttttaatatctgggcattttttgctccacatttgtacttatgagattcattcctgttgtttcatgctacagttgttccagtagatttaaccactaatataaccatgcaaatagttgccaccttttctaatgagaaaagagtcccattatgtgaggcccataaacaaaagattatgtatatttttatgcatttttattggatagaaagtgtgggcaacttgacagatacatttctgacatatacagagctatgctaacattgcatttagatatagttactaaaaaattataagaaagttctgcatgttctactctatagtactacaaacagccttgtaattagaaaaaagaaggttcaaaatttagtgcaatttacacatacattgtcgattcaggaaagaggctaggattcaatgaatgcactgacattttgaaacaaacaaacaaaaaatcctgtgtctttatgagtgtttggaacttcaggattcaccaaactattcttggttgtttggaaatgatgtacacttagtcctggaagaagatttaaggaaacaccacctgcctttcagtagtatgtttctgggaaggctctatgttaaccattctgcaatacaaatataaataactagatacactttaagacacaagacgtaatggtctaaaaaatgatgttccagagcagttggaaatgcagacaagtacatgattaatattgcaaatgggtttataaaatctccaagttgctcaacctcccttgagactcagtttcttcttctataaaatagagataatgctccatctagctccctgggcttctatgtgaatcagatgacgtggtatataagacagtactttccaaattgtaagacaagaatatggtatgattcttacttgcggtaaatccttttcagttgctcattgcaggtcaatgtgaagggggaatacccagatacgtagcaccacagattgcagcaaagtttagccaggtgatgaataagtttgcctttggaatcagacagtcttggatgggagtacaggctgtgccactcactagcggctgtgtaactggaggcaagttattaatctcctagagccataaatttcatttctagaatggagatcatagcatttgttagacttacctagaggaataggtaattgtaagaaatgcacccctcatggcaccttgtgctcagaattataccaataaatagtgtcggttaccataattctattatgataatagcaataataatagtatgatggcttcaagcagccacttagtgctgttgatgtacaaggcaaacattgacgtcctggggtagtacctgccaggctctcccactgttttgttacttcattatttaagggaatttttccaggctgatgatagcaggcttggaaccttggtagcttacatcctgtggcctctgggcacctacaaaattcaggtgtcaagggagcctcatgtgggagggcctctgatagaggaactactctcctcttctctgctcccagattctcaggtaagccctgtgcctttctgtaatttcttgatgagttttagaataatggaacatatgagcagaaagagacctctagacatcatttggtacaacacccacatttcatagcagaagaactagggctcatagaggctaaggggctttcttttagagtgagctggtgataaagccgggactataactcaaatctcccaatacccagttcagaacactttcttctcttccccgctgccctcaggaggtggcttcacctccactctctcaatgcaaatggaggattgttatctgctttagatttgggcttgaatcttattctccatggaatcccttggacaatgctttgcacataatagttactcagaaaaaaagtatctttaagtggaattcaatttctaggataccctcttctcatattcaatttttagagcagaaaccaaccttaaatatcatctttaaatgaccaagttcatttctctgtgctgcacatgtcctacttcctaggaacattctcctctagttgtcctgggcagtcaagccatctttccattgctcttccactgcccccactgtacagctacgtgctaatgcttatgtcaagatagcacaatatagtggctaagagtataagacctggagtcaagagagaatgaggttcctggctgacacttactagatctttaatgactctaaacctgttttcttatctgtaaaatggggaaggtaatgcctactttgtaaggtgttaaacactaatagtatgtaaaatctttagtatagtgcctagcccatattgagtgctcgataaatgtattaatattagattgcatcacaatgtatacattgatatgtctgtctcccctgttgaactgttatctttgggtacagaaccttgccttagttaattttgtatccatgggatcttgaacggtgttgtctggtgcagaataaatagtcaagatttttaggagagggagaaagagaaggaagggaagaagggaggaccagttatgcggtgcagctgagcgccaacctaaaaaattaaagacctgggttcaagcttcagcttttccatctactggctgtggagttctaggcagttactcaatgtctgtgaaacacattctctttatcagcgaaacaggtttgctaatactgacatcatagcattgctatgaggataatttgagacaatgtgagactgtttgcatattgaaatgtactttacagatttatacaaatcatcattgctatgagaagacatgccttcactgtctcccttattttaccagataatcagccactttgcagtgactccatctatggagcagaaagcaccccgttaggtgctgtgaggaggcctttgctttcaatatgtttactatgcagaagggaggttagaatccacaacctccactcacagccatggcaggtagcttgagagaacttctggctgggagcctttgacctccactgacctacctctccgagtgcccagcagcagcagtctctgaagtgacccctaatacggcatgcacatgccaggcctgctcaagttcatctttggaatgctgtgtcctttgtcaaatgtcaccagcatcattttctcatttccctcatgacacacattttaaagcagcaaagtgtattccccatgatgtaaatggtacagtggcagagagtggagacagagggtgccctaatgccagtggaagagaaagtcagggctgattcctgaccgccacttccccgctctgagcaccgcatatagggatctgctctgagacctttatctttaccttcatacagagcttctccttccttacgtataaatccccaaatgtataggtctgggaacctctagagaaacacggatatagagaaattcacctcagtgcctcttattcttcatcagggatctataaagctttttcaatagtaaaagcagctccttttaaacactccctgaaagcattacctgatttcctcacatctaaatccacatttctttaacctactcttttcatctaaatgagagctttaggtggatgttgagcctccattcttaattctggaggcttgggtttctccagaatgtttagaaggtttggctcacatgggtgttggtattagtttcctattactgcaataaatattacacaaacttagtggcttaaaacgacacaaaccaaggttttggcaaggctgcgtttctttctagagactctaagggaacatccattttcctgtctcttccagcttctagaggttgcatgcattccttggctcctggccccctttcattttcaaagggagcaatagctggtcagacctttctcaccttccgtcactgtgacactaaatcttctgcttccctcttcagcattaagaacactttcaattacattgggccccactggataagccagaataatctccttattttcatgttacctcactagcaaacttaactccatctgctaccttttgccatagaacagcacatgtttacaggttgcagggattaggatgcagacatctttaggagagtgatttcaggatctcaaaatttctctatagcaggatcaacaaactacagcccatgggccagccacatgtttttgcaaataaagtgttactggaacacagccatttgtttatttatgatctgtgatgaccttcgtgctaaaatggcagaattgtttgcaacagagaccatatggcccacaaatctaaaatatttattgtctggctcttttgaaaaagtttacctctgctctgtagcactttctgtgtctttggttctgactgtgactctttagaacatcactcacaaccttgtggatatctgcttcatgttttaattacaaccccaaccccactttttaaattctagcagtgttctgcctgcctctccagcagttcctcctctatcatcaattaccataaaattatttatcccttgtagtaactccaagcaccatagagtgttaagtctctttactttttccctctgcttaaaatgcacttaccttctttctctatctcttgccaggcaagctcctatttatcctttaaaaccgtgccaatgcataacttccaggaagccttctctaacatgcccatccaaggagaagtactctactctgaaattacttctagaattctagaatagaattacttctactctcaaaacagtcttgctggactgtaagtgcctcagtggcagtgactgagtgatttacccttcttgttgcccctgaaccttgctggagaaactggttctttctatttcgtggagggaatggctcttttcttgaagattcacttcccttctcctggcctcagtctcatcatgtgtgaaccaaagagttggattaaatacagtcagtctctaaggtcccttccagattcaataatcctttccatcccagaagatttggcctggttccttacagatgctgaggagaaatctcctgcattaagcttgcaccctgcagagttggaaatcatccaaaacatttatcactcatagctttgctttgactgtgtggcaactgggaactgaggaaatgggggtagagtgactggaagagaacaaggagttgctgagataatttgggggagatctcttgtaagtatttggccctgacctttcttcaggaaccaatgagaaggcagcacagtggcctggagagttgtaatccttcgcagcaatccatgcctggggctcctccacttgttatggatgcaccctaaatccttgcaaccacgtgggagtcaagacaaactcaatgtggtccaaattcacatgtctccccctcctcccctaactccctcacatgtatcagtgagggagtttctgctcttgtgtcccactctaaggctttgtgacaattttggacacaattgtcaccctttgtgatgattttggaaactcgtctctccagtcctccatatcccatcccttaaacatatactttttccttccaaacattgcttagaacttagctcttctctgttatcctattgctaccatctattctagcctacacaggtaatcctgacagtagaatcttccccaggttcccaactctagctacttcccattgagagccatcttacatcctcctgccagcttcatagttgcacattccctctcccctcatgcctcacccctattcaagaacctacaatagctccatgcattcctgcatcaaatccaaacttcttggtctcatttcgtaatctggctccactgttttttgtttttgttttgttttgttttgtttttttggagatggaatctcactcttttgcccagcctggagtacagtggcgtgatctcggctcactgcaacctctgtctcccaggttcaagcaattctcctacctcagtctactgagtagccgggattacaggaacccaccactatgcctggctaatttttgtatttttagtagagatggggtttcaccatattagccaggctggtttcgaactcctgatctcaggtgatctttccctctcagccttccaaagtgctgggattgtaggcttgagccaccgtgcccaacctccactgtgttttcatcactctattcagtgaaacctatcttgtctctgcttcacatttcattttggccgccatgccattccgcgtatggttaccgttgcctggcttgtaattcagcttaattcagtgcattttcacaaacacttatgaagtacctgctctgtccaaagcacaagcacacctttgctgctcccagtccttctctgatgatccaactgcagtccatggtttgcccttgctgttttcactttgtgtctatgcactcctcccctcctggagcacattccttgaggacaatgacaactgtgtctttcactctcgtacttactgggacctactgttaagtccaggctcccagaccacctttacccatacatcattctcttcccacttgttctgtcatctataaattaatgataacaaatctatctcacaaggttgttttgagtattagagatattttgttcagggttgactatcagttgatggttgcaatgattagcattatttttatatccatccccttagggtctttcagtttttgttgcacaagctcttaagcatttggagttagagaaagtaaaatgtgttttattactattaaacatagaagttatttctgttcctgagtcttgattggaaaattccacactcaaccccacgaattactgtaggttaatgcatctaatttcacctgttcataaggcaaatgtttatttattttattttttattttttggaggcagagtctcactctgtcacccaggctgagtctcactctgtcacccaggctggagtgcagtggcacgatcttggctcactacaacctccgcctcgtgggttcaagcgatgctcctgcctcagcctcctgagtagctgggattataggcacacgccaccacgccgggctaatttttgtatttttttttaatagagaccggatttcaccatgttggtcaggctggtctcgaattcctgacctcatgatctgcctgcctcggcctcacaaagtgaaggcaagtatttattaaatgcttgctgtttatcaagcactgttcagtccttaccattagcaacttcagtggccttcttttttttgaaggtgagtcattccctcttcctcatctcagacccagccctccctacctacgaggaagtgtagtatgggaactgtggaattcagagttttcactgagggcttggttctgagccttggccacgtaaacctcactcactctccaccctcctgtgttcttctgaggctgtgtctgctgggtaccagctagagccttctgtctgctggctacctagcctattcagtttcagaaaaataatttctaatccaaactacaactatttgaaatccagtcagagtgtagcagtaattcattcattcaataagttcaatcagtgagtaaattcaatttagtaaatgattgctaaattaaagcaatcacccagcaaggctgattcaacaatctcaaaatgtctgctgtatgtttctgcaacgaactttgtagtgtaatctcttcattaaaagattaatattcccttgtttactactatttcaaataatacaaattcacataattcaaggaaatcttccaaactagataacatgatattatatggtaaatgccagaagaaccagcaaaacaaaaaacaaaaacatcaaaccttcactaatgagaaaacaacctttaaaaattgccttaggcatctataatctagattatcccagttttaagactttgcagaatctgtgtctagttgttatatgtgtgaagctggcaacaagaggccaaaatatcagaagtgacatgcaaaacatttacagtcctgtctgtatgtgtgtgttcagggggagattgatttaagccaatattttctacctagcctgcacatttatgttggcaggatttcactggtaaatattggtctaaaccaaacactgaaatctttaatcacatttaaacagacattgcattatactgcattagacactgcattagaaaggaaccaacagggaaaaagtaagcacagctgatagctacaatctttcaagggtaaaaaggaaaaatcagaattcagtaagagtcttcagagggagaaatgccaagaaaaccatagctgaaatacaaaattttgtttttctaaagtctggagctgagttcagttaagtgacgtagtttacaaaccaggggaaattagggccggaacggaagtactgctaaattaggagaaattggccaaaggaaagtgagctagctgtgacatacacagtgttggcttctttctctcattctcaaacaattcttgtttgctactgtgtggagttgggttgccatgaaacctgaggcctaattttatatttcattggaagttctgaatctgtcacataaagcaactgtttgtctacccacagaggctgcaaaaatcataactgttaatctttcctaacacacacagaaaaccccaacccaaaaagagttgcttggctttctttgttcagtgtcttcattcacatccaggggttcttactgaatcatccagaaccccataaatcacctcaagagcctgtgagtctcctactaaagtgttccttcctccatccctcaccacctctgctgcaccaaaccctaccccgcacacttcagacacagccctagactgcttagatgcttactaagaaagtctttaggaggaagggctgttttatctctgaaatctatgcttatcccttcttaattaaactgtcaggccccacattttggtgtagatgataagatttgagagaagcagggatcttgttgggatgaatggtcagtcccactgaagggtgcctcaaagaaaaactgtttttttttttaaatttcttttctttattattatttttttaagtcaggcctagtgcagtgcctcacacctgtaatcccaatactgtgggaggccaaggtggcaggctcacttgagcccaggagttcgagaccggcctgagcaacacagcaagaccctcatctctacagaaaatttaaaaatcagccaggcatggcggtaagcacctgtagtcccagctactttggaggctgatgtaggaggatcacttggcctaggagttcgaggctgcagtgagccgtgatcacgccattgtgctccagcctgggtgacagagtgagatccagtctctaaaagaataaaataaaataaaataatttatcagctcttaggcaagattgaggaggtgggactcccaggaaaaaaaatgttgaaggactcattgtggttattgccaaacctggctgaggatggaaatcacctgaagcaattctaaaaagaacaaattcccagaactcagtctgccaagactgctttatacatctggggtttagcctgggaatcacccccaggagattcagatgcacctcttctatagactggtatagtgatgaatatcaactttgaattcaggctggattagaaaccacgatctaatatatacttagtgttgtaactttgggcagattatgtaacctctctgagcctcagtttactcatctataaaacagggataataactatttactgggggtgtggcaaagattaattaaatattatacatagtctctcacacactgcctgacttatggtgggtcaaaaataaagttaagccaatccaaatgtctccttgagactcacccaactgagatagcccctaaggcattcctgatcacactggaggcaaactgcctcagtctgaatccactaagtctgtgattctggaaagttactgaatattagcaaaaaatcattatttttattaccacctcttttaagacaagcaattatggtggaatgaatgctggcctttgagtgttcacgtcctggctatagacttatgacctagaatagtgcttcccaatagaaatataataaacactctacaggtaatttaaaattttctagtaaacacataaaaagaaacaggtgtaattaattttattaacatattttacttaatatatgcaaaatagttaacatgtaatcaaatatatgcatttattgagcaatttacatcattttttcatacaaagactttgaaattcagcatgtatgttacacttacagcacatctgaccagagactagccacagtttaagtactcagtagccacatgtgactagtagctaccatattgatagcacagtgtagacattccagattctaaagcaagtcatgtcaccttcatgagcctcaataatctcatttgtaaaaatggagataactttaatggctttgtttgcagaagaaaatcagtaaacttgaaagcgcatgtcaactggtaaagactgtatataacaggttttctgctctttacaacacttagactacaaaatacaatgcgattttcataaagtgatgtatccaaggtcgtgtgtgatctgagacatcactcaggatagcatcaggcagagacactctcctctaggcagatgaaagagattttagctagtagtgtttcaagaggttggaaatttcttagtcctcttctcctcctcacccagcaccttcactctcaacagcaaacacatttgcttctactcttcactgactcttgaaattccttcgaccattttcattctacaaataaagataaaattgagggataaataacccttgtgttccctctgataacatcttaatttgaggcctccttacttcttaagctcctatctttttctacaaatgatattctctgatgttaataatttaccaagtgcttattctctgcactcttataatttttataaaattctgctaccagagcaatagctcatcttcttaaagattgtattgtatatatcaagagcactgaacttggagtcagaaagcctagattcaagtttccaggttctacattttctagttatgggatttgaggtgaagcctgtagtgaccagaagacatgaaaattccctgagcttcatcaggcttttcctctataaaataaagacaataatacctctctcgaaaggtagatgaggattaaaagagataatgcataagaaagtggtctataactgcaaagaattagacaactataaaatggtatttagggatttataagccattttgtgcatgctattcttccattgagcagtttccaatggttccttcttgcctgccaaataaagtcagattccttaatctaacattaaaaacctctccaaaatttggccctgaccacactacttttggaagtttatcctactcaacccacttactcaaatcaaatgttctaaccaactagaactctcatatttgtcctacccaaacaacactgaatggtgtgacctatttctaatttggtatatttcttaatgctgtccattgccttacctcattttccaacctctcaaacttccacccattcttctttaccaggcctccaaatctctcatgatctcgttttccctcatgtccttgaactctatctctgcagcctctgaactttgcttgtgtctttcttatgacagctataaaaacccacgtgggattctagtaactcttggtgcacagagacttgcaacaagatgcctgaatgtgggtactcagtgagagttaaatatccaaatctgcaagtgattttgcagaagtgctattgagaggcaaaatgtttcccatataaaaactagccagcctagaaatctaatcaacacatgaatgcaaaagaaagatagagctgattagctgtggtaacactgaataaatcagtaaaaagaaggtgatttgtttggagactagcaaaaaaagaacaaaggacaagtattggacattgtgtctttgatactgttcagtagcaaaggcccctttctttttggtaatgcatagcccatctgttgatatgttgggcatgtctacatttcaactaatattttctgagcttctactaggtaatagatgcttgatgcacaaaaaactaaaaaaatagattctctaccctcaagaaggttagaatctaatagatgagaaaaaccaagagaaatatttgtaatgaaatatggtcatttggaaatagaggtttgcatatggtgttgtgagatcttagaggaaggaggcttaatccaacctcagaatatttagaaaactttgtagaggagatgacactaggctgcatcctaaaagataaggaagagctagccaggtgaacaaagttgggaaaggcattttaggcagatagaaatgcttgagcagaaacaactattatacaatctatctcagcaagggagctgagtatatcaggcttgaggaaaggagccatttaaaccatccaactagttctcctgctctgatttcatgcttaccaagccatcttatggttagaatttggcctcccacatagggaaacatgtgattaccagaagacataaaaagctttttataaattactgttctctattaattcattggactctgatttgccactgggctcttgtgagttgaactagtataaactgaatgaactcaaaatacactaacaaaattacatttctggacctgaaaggctgaagtgacttgaattttggtcatcaaccaaattccaccaccttagaggccatgtggttctaacttatgaatgtttcaaatccatttacctctcttcatctccattgctattacatggttgtagctatcatcatctccagcatagactgctgtaataaagaagtcataatgccatcttagtccattcttgcttctataacaaaatatctgagattaggtaattttcaaagaggagaaatttgtttctcacagttctggaagctgggaagtacaaaatcaaggcattggcaggttcagtgtctgaggagaactgcactctctgcttcaagatggccccttgtttatgtgaaggacctcttcaaggagaactacaaaccactgctcaaagaaataaaagaggacacaaacaaatggaagaacattctacgctcatggataggaagaatcaatatcgtgaacatggccatactgcccaaggtaatttatagattcagtgctattcccatcaagctaccactgactttcttcacagaattggaaaaaactactttaaagctcatatggaaccaaaaaagagcccgcatggccaagacaatcctaagccaaaagaacaaagctggaggcgttatgctacctgacttcaaactatactacaaggctacagtaaccaaaacaacatggtactggtaccagaacgcagatatagaccactggaacagaacagagtcctcagaaataacaccacatatctacaacctctgatctttgacaaacttgacaaaaacaagcaatggggtaatgattccctatttaataaacggtgctggaaaaactggctagccataagtagaaagctgaaactggatcccttccttataccgtatacaaaaattaactcaagatggattaaagacttaaatgtaagatctaacaccataaaaaccctagaagaaaacctaggcattcaggacataggcatgggcaaagacttcatgactaaaacaccaaaagcaatggcaacaaatgccaaaatagacaaatgggatctaattaaactaaagagcttctgcacagcaaaagaaactatcatcagagtgaacaggcaacctacagattgggagaaaatctttgcactctacccatctgacaaagggctaatatccggaatctacaaagaacttaaacaaatttacaagaaaaaaacaactccatcaaaaagtgggcaaaggatatgaacagacatttctcaaaagaagacattgatgcagccaacagacatgaataaatgctcatcatccctggtcatcagagaatgcaaatcaaaaccacaatgagataccatctcacgccagttagaatggtgatcattaaaaatcaggaaacaacacatgctggagaggatgtggagaaataggaacgcaaaaaattcctgtgttgaaaccagtaggtttcaacacaggaattttggggggacacatttagatcataacaaatgctaccagcaactaggatggataattaactaggttactaggtaatgttttatgtgttttggtatggtttacctcatttaatcttcataactatcccacaagatatgcttacccccattttagagatgaggaaattaaggcttagagaaattgagtaactcaaatggcaaagccagatatcaaactcgtgtatgtcttcctgtagatatggggctcttgaatactatttagctaacctcatatttctagtctctagatttcattcttgccttcaagttcattctccaaattgcagccagagggatctttttaaaatccaaatttggctgggccactcctttgaaagagctccaccaagttttccagttgcttccagaataaaatacaagatctttgcatggccttccatggctgtatataacttgatctagcttctcctatcagtctttccctgtctgcgttcatgagcatactctgatgttccccttgcctggaatactttcctctcccttgacacttaattcttattcctcaaaatctcataactttccaaggcaggccttccttcacatcccacttttcagattttgggtccctggttatccctattataaatgtttatagcattctacacttcttagtatctctgttccaagttgtactaagtttttgcataattatttttctattcctcttaggatataggcttcaagtaagcaaaacctaatattcagcactatacccttagagtttcatgatgtgcctacaacataataggcactcaaaaattttactcattaattatttatcgtatcatattcaataaataatagccaacattcatctggtacttgtaatgtaccatgcactgtcctaagcactttacatttatttatttgttaaccagatgctacagcccattaaaatagatactattattattctcattacacagatgaggaaactggggcacagagaagtaacatcttatgtaacaaagttttataacagtaagtggtggtactggaatatgaaccaaggcagtctaaccccagagaccaagcttttaatcactgctctatatccttcataaatattttgtcaatatatttactttgttagaaaaataattggacagcagcttgcctctatccctatcactttcttgtgtcattggtcttcaataccaatacaggtagataattaagttctttgaacatcccttcacattggtggtacatgttttagctggatgagaacagattctcgttagcatataaatgccaaaggcagagttctggagagcaggttttcctaagggtaaggacattaaaagagtgggaggtagaccaaaaggaaacagtgctatgaggctggcacatcaaagacatagttttgccttgactaagcctatctctgtaaaagaaagagaaacttagaccatttatttataacaggcccagtggtttagcaaaaaagttatggaatttagaatcaatatgtcaatcaatataattaaaatgtctccttcattctccctccttttcccatcttcccctctcaatctctctgtccttcttctttgcctccctccctcccagccgcatcatatcactttgagcaaattgttaaatgcatccaagcctcaattttctcacattcataatggaaaatgtatgtcataatgataataatttctctcttggggttatttttcaaggaaaaaaatgagatatgcaagtgaaagtgcttggtaaactgtcaagttatatatataagagccagttgtgattagaagttttgttttacttgtagtcttagaggaatttgctaaagagatcggcatcaaaatgacctacttttcactgttatttcccttaagggcagtgaacctcttcttttatgaatccacccagagtgaaatccctgtcatatgcaattgcaaagttccatatctataaagacatgctaacaaagttctgcctaaagaaaggctatatagggcttgcaaactttggtcttggaagaattgcattgcagtgtgtacatgttctcctgttcttatgatttgttccatagatactttacccaaggttaaaataacatgccctcttgaaatgttgcactctaacctgagtgtgcttcatttaccaaatattatatatttggacataataactcatgatgaagaaaaattatatctaactctaagggaaaaaatcacaaccaagattgccaaataaatagataaataggccagtagcctcaacctaacacctttgcataaagagatgccaattcctatatgtatgaaactattttacattttatcaagtacttattgcactatgggaaggaaccgaagaatggagtaagtatgctaacttaaaggcatgtagagccataggagcaacccaaacgtaagacatctacagggctagaagcttgtgaatgaagctaaaagtaaagctgaatgtaaataatccaattaatacacacttctcatttacaaagatcagaagattatgggaggaagctgagaaggcgcctagcttcacagacttactatttatacaaggaaaagggatttccaatataatcattcgctacaatggacaataccactcctgaagtgtattgttcattgctgtaatccagcacccacccagcagcaggcttggcacatagcagatgctcagtgtacttttgctgaatgaatgaacaaacaacttccctatacaattctccacatctgaaaggccactgacctggtatgtcagttagaattttgtgaaaaaacgatccatcaggtcagctctatattttagaagtggaaaccaacagtctctaacttaagacaaatgtcaagaatgcatttttctgaagtcctacagtgggaaggacgctttaggatttcatggccaaccttacaaatgcttcctttcccagggccaaatcaaaactctgtcaatgactcagctgtcaaatacatgtcaatatatcatcaggaaagtgacccaggaccagagaagtggtgggaaggaggggagaagttcctgacacgtgccggatgctgtaccaaaggcttggcgtatactgattcacttaattctcacacctagtttaaactatcttcctgttttacaggtgaggaaatggaagcacagtgggctacttttcttgtctaagggcacattgctattaaatggcacagttatgatttataaacagctggggcagactctactgtgttccactgaattttgagttagtagggcatcctggtctatgtcacattaaaaccaacatttgtcgttgttttttagctatgtgagatttactcaaactctgttgatacccattgttatagctaaacaaaaggaaaggaaatgttttttagaaattctgctcttgtttttttaaactgggcttcccctagatgggactatctgttgaaagcctacatggacaaccagaaagacagcaaagtgcacaaatcacaagtttagaaatcagtgagttcttataaagtgaacatacctatgtaaccagttcccagaccaagaaatagatcattgccaaccctatagaaagcccttcaagtccctcctggtcactaagcccacaaggtagccaatatcttgacttctattactatagattagtttttgcctctttggaactttatggaatttgacccatactattttttcatatacattttaatatttggtttcctttgttccacatttatgtttatgatattcattcctgttgctgcatgtggcaattggtccaattgttttagccactagaataactttgcaaatagttaccaccttctctaatagaaagggagtccaattatgtgaggcccataaaggttatgtacagctcttttctgtgtgctttctgtggatagaaagtgtgggtgacttgacagataagtttctgatatatagagatatgttggaatatcatttagatataatttataggaaatttatatttgggtaatattgtgatgctttcaattgctaatcatgtgtaattgagggcagagcattttttcctctcagcctcagttttctcaactgtattacaagccatgagacttaaggtttcaaagttaaatgatgccagatacataaagggcccctgtgcctacttttccaagagatcagtgtagtcataagattacacttccctgcacagattgcagggccagcttttagggcacctgaggtctttcaccagtggggccactgatttcataactgctaaaatgtgtccccatgttttctaactatgagcaactagctatttgtggccaggcagaggtttctaattaccctttcctgtcactcttctctggatctctccctcttcccaacaggactctgctaactcacacacccatttctactagattggcatttaaaaagctggggaagttggtctatgaacctaagtattagattaactgaaaaatcattgaaacagaaaaaaaataaaaagatcattgactgaaaataagaatgttgctcagcagtttgtacaatgtgatcctatttatgttatatacatatgtatgtttacacagacacacaaacacatacatgacatgcacaaaggagtcaacaatggtgatctctgactgctaaaaatgtgagattttttatcatttgaatttttggcttctctgcaattttctatttttctaaatgtgcctatatcccatctgtaacaataaatgagatatttgcaaaatatatttaatactaaaaggtttacagtccatttttgtgtttattctctgattctacctttcccatgagaataggatatttttcttatcctcattttagagataaataaatttagtcttcgagaacataggtaatttacccaaggtaacccactgaagcaagatgcaggacaagaaccataccaggtcttctgagtaaatattgcacagcttccctgtgcattaggtagatcagaaaagggaagtggagacttcagaaatgacaacatttaggaaagcagttatgcaattttaaatggaagagatccgagggtaagatgcaactttaaatgcagcattttcaggaataggtgcatctttcagtgctaaactgaatcctctgtttcatagaccaagatatagtcttgctaggaatctggagggaactatttgctctaataatttaatctctgatttcttagtttatgccttaaggtaaataagataatcatcctacttccgtatctatcacacaaagatgttgcaaagattaacgaatagtgtgctgggagctcctttgagaaaagagctatttgaataccatatatcattagcagattaatattataattatttactaaatttctcttcctgtttctcagagtcaaatgcaatacccagcaaacttatagaaggaagaaaatctttctgtgccactcttgttggagtgaaagagggaaagaagagagcaagagaagggaggttggttctccctacttcttccctctggaagtttttgaaagcgaagttcaactgcatgaccatacatggtcccatgacctactcttactgcctctgagatttgcttctgtggtgttaaacattgtttcttttcagggccatcttatgtaagacaggaagagacccagtttcatgggcatgtaacctgttgggttgcacagggccctatgctcagaagggctccatatttgccatcttaaaacttgtaataatactatctttgaacttgtgttttataaatgatgtctgatgggacaatggagtatgtgccagtggcttggagccttggctcatgcacttcctcacttcctgtcacctgcctgtctccctggacaagatcctaaccatcctctcctctgctcgctggtgccctaggaatcgtccagcttcctttttcccacctgcacttgtgaccattgctgccctccatccccaatcagggtataggcacagggagggtctgagttagccacatgtgctttgtagcctcagatgggacatgttagcagccgtctttgccctgggctggcatggctgtggtagacagaggccaggtcttgatggggatgaacctcttgtccacccctgtttcaggtacccagcatgtccctgctaagaggttgcagtacccttagcagtatgctaagatccaaggggttgtctgctgtggataggggcttggggaccatgagaagggagaaatacctaattcgacttccccagctcttgtgcctggtggggacacagcttgtcagtctggcggctatcaggaaggagtagccagctgctggtgagctatgtgcgtgcccttagtcataagaggcagggccttcaggttgctgtgagggtctgcactcacctcaaggtatcccagtgcctgaaataatacaatatttaaacacaccaaaccattaattgtgacaagtgtaccataataatgtaagacattaacaatggggaaattaggatgtgggatatgtgggaagcccctgtgttatctttgcaatttttccgtcagtctgaaagtattttaaaataaaaagtatatgaagaaaaaaccaccatgacaagttgaaagagagaatgcagaagaaaggaaaaaactttatattttagtatcttttatagcaattttactgctttttcaacaaggggccctgcactttcattttgtactgggcctttcaaattatgcagctgattcttactgtaaaatcccttattgaatgtgcaattcagctatctctctttcttttcttcctcacactcttttctacccttcaatgccaggccttaggatttctccaattgccattagtaattctcctatgcatctatcacctactaagaactggctaccatcctaggcacttcatatattttatcttatttaatccctttataactttatgagataaatattttatccttcttctacagatgtatgaaattgaggtctaggaccacacagtaagtggtagaagagaaagtcaatattcatgattctcactccaaatctggtgctttttttcacagtgctacagatggaccattcagccttcaggtgcccaggtatttgtaggatgcttaggcaatttggtttccattcctccaattatttactgagtatctcctaggtgctaaaactacaaagttatatcagggaggccagtcctgcgctgctctggtcattttctttgattgcattcataggtagcaggtgtttgatatccccctatttagtacactctaacctctgtgcccatggcttagttgccatgataggaagactataaagtggacacaaagtcttgactgtgaattaagaatttggaaagtgatactctagcctaactaacattgcttcaaaatgtattaatttttgcttaaacattttgatggctgatctgaagaagagaggacaatggagcaaggtctcttcatatccattacctgttcacccacatctcacgttgtaccaactctagaagtacctgagtgcttgttccatgcagtagacaatgaatgagctcactggtgtatctttgaagagtccttctcttttttgtacttctgcgggtataattactgtatgtatttccttggtcaagcttgaatagaaatcagatcccttttttcctctgcatgaaggagaaatgtgatgtatcatcttgcagtcattttgcatatcagtggattcaaaaggctaggagcaagctactttctccccaccgtcctggtgaatgtccaatattagttacagagaaccacaggttgtgatgtggaagacatgaaggtagtaaatccccagcagctgggaagtggttggactttttcctttattagaggcagggaatgagaatgggagggttctgtctcttcagaaaaggcttccttggaagaagtgctcttctggaagcaaacagaggaggcaaggggttgtttcggacacactagagagtaagtcagagaatcttcgtgttgaggcagcattgcaaaattgaagatgaagaaaggaaggaaggtatgtgtaagtctggcttgaaatgagttttattaaaaacacctcaattcttgtctgcacatttttgaagagtgtgaaaaaaaaatggaggaagttacctccagtggttttgtggctttttaagcatgacatacaggatattgaatttaacccctgtttatcttgaagtgtatgaatatttcggggataaacaaagcaactattctttgaaatatgcgtctgtggccaagtgattccagttacttggaatcacagttctgttgattctcttttctgcttcaagtatttgcacaccacagacataagattattcatataataatttttaaaaaccatgtggtcttgctagaatttctgtataaatgtataaaaatgtcttttaaatatggcaggaatgttatattagaactccatgtgagattttacattttattagtgcctattgtgtgtttgtatttcagaaatcttggtagagtttataaatgctatttctctcaaaaacagtcgtgtatataggagagtccaagtgctttttacaactctctgtagcttcattaattcatctagcatttataaagttatttcagtgcttattaagatagatttcttaagccagtaacctgaagtatttgtttagattcacaaacttttggatataaaatgacatgttaaggatatgtaaaaagaattttaattatctagcaaaaaaatgtgattttcacaacaatattttttgtgtgaaataccaacaatatttccagaaagtctagagtcttagggcaacaaattggagcccccagctttaatcaaaataaaaatctgcagagtgttcacatctggctccacctgaaagtccggttcagaatttccctgtgatcctggcacttgcagaagggaagttttagctttgtttagtataacaagagctgcaggactcccaggccaataaacgtgttcacgtaaaactccagacagcttcttttagactggagtcttatcagggagacctcattttccctctaattaaaggaaagatttaagggagagaaaggaatagcctatgcctcttacttgtgcgggtcagtgttcgctgaattagaagttattccaacatgaacacaatcctcaggatgaatgactgcctagactttgaacgtaatggtcaaccagttttcacccgaattttgactgtttcatttagaagaaaagcaaaatgagaaaaagctttcctcatttctccttgagatggcaaagcactcagaaatgacatcacataccctaaagaaccctgggatgactaaggcagagagagtctgagaaaactctttggtgcttctgcctttagttttaggacacatttatgcagatgagcttataagagaccgttccctccgccttcttcctcagaggaagtttcttggtagatcaccgacacctcatccaggcggggggttggggggaaacttggcaccagccatcccaggcagagcaccactgtgatttgttctcctggtggagagagctggaaggaaggagccagcgtgcaaataatgaaggagcacgggggcaccttcagtagcaccggaatcagcggtggtagcggtgactctgctatggacagcctgcagccgctccagcctaactacatgcctgtgtgtttgtttgcagaagaatcttatcaaaaattagcaatggaaacgctggaggaattagactggtgtttagaccagctagagaccatacagacctaccggtctgtcagtgagatggcttctaacaaggtaagagatgatctttttattcattaaagtgtgatcatgcagggagctccagctcccctcacccctgtctgcagcagagtgcaccagggaatgctaccaactctaagaatatgtttgttgctttgtctagaagattctcttccaaagtgtcacactctacttgtgtcttgatgctacagcaaaagtttaaaatcctcagtacgcttcaatttccagaaacaaaacttctctcttactgatgcagtttggaataggtttaaggtgagagatgtctgtctgtaaagcttccaaatcaatataacattgaaagtgctttaaaatttttttacaattatcaggaagctaaaatctgagttagtcttgttgcattgcaatcaggtgtcacatatttatttttaaacaagaaagtagtttaaccttcatatatcaatgggaaagaatggtctgtgttgaagtttgataaattccctctaaaaagaaggatatcctgggattttctaagatttcttttgcgatgctggcatgacctaagataaaaaagaaacaatatgctttgtctccaaaaccagaggttttctttaagtttgctgattttcatagtgaaatcatttgaaattgcttcatgcatactgcccccaaaatggttttatttacaatccccagacaaagcttaatgttgaagagccttaattatctatcattatatcatttgtttaattaacacctggacttagaatgctaatttatgtagtgagagttgttgctttttgtttgtatttttaccttggagaatattatattaaatacatattgctataaagttatacaaagttatatatgtgtgtgtacacacacacacacacacatacactttgttaaaaagccttacaccataccctcataggtgcacatttcagagtcccagtcattctagcctgaagtatcatcttgttgtctacgtttctggggctgagaagatattttgctccacacctgccagcatgccctttccagccctgaggtgcaccagtgagtgtgtgtcccttctccagctttcctggggtaaaagtaccacctttggatcaaggcttgctggctgcggctcagaggatctgcgcagaggaagcagtgtgtcctcaggagatcctgaaggaggggaggggggactcttcctacttggaactctttgtttattggttaatgaaagggcaaaaataagtccctttctaaaattttagtttagagtttaagttggaagggaaaaaaaaagaaaagaacacatttgaggattaactatttattgacttttctctgaagttctcaattgaaggttaaactcagggattttccaggctggggtaaaactcaaccaactgcttccccatgaggagggctttgctgtgtaacttctccaaatcacactgggactccatgtagaaggactttcacaaggcttgagcctactttggagcattagcagacactctgttccctgtattttgtggtaattgacggctatgcaagatgtagatccaacatttatggggtagtttttcaacagctttcaccatagagaacatggcaaacttcaatagtcaccaaaatatactaactagagtcaccaagataaagcaggcaattaactccaagaagagaaaaagagtaccccctgagaaactacaaattgccattaattttcattttgagtgtcaatatgctgtagtattctaatcccattcatgcctagagtgctggaattagacattgactgtcttgcaaatttattaaaaataatcttattcagcatagtagttagtaaggctctgagaccaggcactctgtagacacgggtgaggattccaatccctcaggcttccgctcctcctttatggtgttgtgtgcaggaagcaatgaaagttgaatagagctaaccctaacaaaagggctaaccttcaatgctgacacagttagcttaagtaaaaagcatgcagcctcagtcattttctagttctacagtggaaaggttgtcagggaaagcaattatttagtgcatgaatgatgcccaactgacagctaagattaatttttaaaaatatctctttttactttactacctttaaaaaattattgattattcagataattgtctcaggttaagcttgagcataacatgcaccatgacacatatgatataaggcaatgaggccagggagtggtggctcacgcctgtaatcccagcactttgggaggtcgaggcagcactttgggattgcttgagcccaggagttcgagataatgcaatgcaaacatttttgtggccaccagaaagaaattgatctacaccagttctttgggaactgaattatccatggcaaaaaaaaactatattccatattcagttttcaatgttgctgaaattatctgagatttccatccaagttgacatcttaaaactttatcatgatcatcactccctttactatgtagtcttatttggccatattttgcttacccttatcaactaaggagccagtgtaaatctctgagttgcagatctggaagtgatgtgaagaaatgttatagagggagtgtacttatcagtggtatccactacatttttgcaaaaactctgtgttcctagttctgtttcagctacgtggccactaagttttgtttgcaatgtctgatcttaagaacagcgataggtgaaattgtgttatgctgaggggtatttgggaattacataagtgcagtctacatgcaactggtagagagttaactgtgtttggtggaggaaaagcaagcatctttcatctttacttcatctaggtagggttgtgcttttttagtttgtttgttttccttaatcctttaaattttgaagaaaactgagtgattcaaatctcctaaaagactttctcaaatgtacttcatagcctagagagttagctaagaaacatcgtcctctgtttggcccaaatttctctgatcccttaatgctggccacagtccagatggaattccagaattttagagaatggtgctgccaggtaggttagtcttgtaaattattttcctccaagaattactagaagatggaataagttcagcagaagttttacaaggcaatggtattgttatttaagatgaaaaggatggctagtgaacctcctgccagctgcccaaattcgattagacatgttagagctagccgttttgcttaacaacagattgccttcttagaattgttcattaattttgtgtttcaattttcatcacctcctgaattagaagaattgtcttacacttcagcaaaatgcatcagagcatgagttcctcagtggcaaaacagtcagatgttttgaaaacaggatgctttggctctccattataaaaagaggaacggaaagagaaacagtatagaaaggaagaaagcaaatagcctcagcagggtccccagcccaacaacggcataaacagtgacctatcttcctgaccttcactgtggctcagttcctgacctcgtgtcaccaaagccaaccaacgtcattagaggaggataggaggaatggcgcagctgctgtgagggtgactacaatttcctgtctccttcctgacagacgcagtcagtaaagtacagggttgcaacaacagtggctgaggaaggaccaacccagaacaatcccagggaggcgtaattgtgactggcggggaatggggaggtgttccttccctcattgtactgagaaacctagtctttcacctagaattttcaggtgaaaaacgtcaaaagggtcattcttacccagaatgctaaatgtttttcaaaagatgaacatactgtggtattcagaaaagctatattcaagcaactagtcactgtcttcacttcccccacaaacgccctccactgtccttttcattctccattggtttggctctggggctgttttatatgcagaacaaaggttgggtgctgctgggtgaaaatggatattctgttgttgaagagtggccctgtgtattagtactttttttttagaatgaagcattaggacttagcacttgagtaaatgtttgctaagatagaaatggaagatagatggtccttcttctcttaaggcattgtgaagtcggctacagataaccatcatgaggaagtgagtcctcctggctatgcaggcttatttttccagttcttcaggtgcagccatactacagtactaaacatggagcacaaaggcaactaattgccagtgctcttgggtttgcaggataaagtcacactattctaccaggccccgagccagctgggaattaggctgcatgacactggatggtgatcatgacaggctgattgccctaatgaggggtgaaccattttgtatttaactaaataatcaataactatggaaaatgccagctcctgcagaactgacaggaaatagatcttactggccaatggattcatcttagaactctgtaagagagagggtagacaggcgctcagtccttgaaaggaatattcatgccacttttgcctaaaatgtaatgatatgattacagcagtgccgcccttagcataagatgcatccatttgctgggccctgtgctgtaatcagagggccttagcctggccttccttctgctgccctccacccaaggaagtaaggagttggccgggccaagggagcagctttgctcccctctctaaactacattttgcatctgctggacccccacattctctgtccaaatggctttgaacccacttcccggccacacaagcctcttcctgggatgtgctgcaggcatacacacccttaggcctaaggagtttaaccaagaggcagcaatgagaggtgtgaagagacttgtgtaggaggaacttgggtaagcaggctgcggtccagggctcacgacggctgctcacaggtccctggagatggaaggacatggggaaagaggagggccaacccatatccaaggagttcaagaattctaaattcaacctgaccttccaggctgttatggagggatatctgtcaaggtaaaggagatagctcaatgtatatctttgtatatttagacttacagtgtgtggccccacacatgttagaggtgaccctggattagagggcagaatagaattaaaatcagttctggtagccaggtgggcactcacacatttttttggttcaacttttctctctttactgctcagatttatatagactaaattatggagggagcaaaataaagtgaaaagagcctaggaataagccatgagtttgagttctagccctgcctttacttaggtatagtaatatagacaataaaactatttggaatctttccatattctcttctataaaacaaaataattggaaaagacccagctcttcagtttattgattgaataatattagtaaacaacagaactacctttacaggtgtatgcaaacattgtgctaagctctttacctcattctgtaatcaatattcacagtaacactttgaaataggtactgttattattcctgctttacagatgagtaaagtgaggcatacaaagttgaaataacttgcttaaggtaaatcatagagccaggattcatatccagtccatctgacttaccatcaatgatcccaatgaggcatataaagaaagaaaaaagtttagagttatttaataattcttctaaggggattttggattggttggtgggtgatcttgttctttcaactgtggcaagcattattagtgaggcctagttcaaatttatattctgtagctaccatactcacagcctctaggatggccattaattgccctaagctcagtcttcttgcctgggaagcagtgtaaggggaaagagcaatcgcaattatagaaaatggttataaagtgctcataaaaatgcaaataatagtattaaactaatccattgcctatttcagatcaatttgctcacttcactatctgtttcttaaaattctccaacatagcctaagataagatagtaaaggtctgttcaaagcactgtagactaaccccaaattccctttttccctgcttctcaaaataaaaagggaaatagagataagctattcttggccgggcgcggtggctcacgcctgtaatcccagcactttgggaggccgaggcgggcggatcacaaggtcaggatatcgagaccatcccggctaaaacggtgaaaccccgtctctactaaaaatacaaaaaaattagccgggcgtagtggcgggcgcctgtagtcccagctacttgggaggctgaggcaggagaatggcgtgaacccgggaggcggagcttgcagtgagccgagatcccgccactgcactccagcctgggcgacagagcgagactccgtctcaaaaaaaaaaaaaaaaaaagagataagttattcttattttttaatttatatgatcattcaaatgatttgggcaatttcattatatgccacaacctttccaaggcatggaacatgaccataaaacagagaattaatgcttcagtaatatgtaagggaaatttttggaagtaacatgtccactgttttccttgggcattgtcttcaaataaagatgaaagagaagattaagctatttattctttgtcattgtttcagttactctttctatgacaaaatggagttgtattagtgagtattagtattagtgcaattcagtattccaagttctagtcttctcaaaacttagcaaatcaaagagtttgaaagttatttggtgctttgtagtaagtttgatttgtaatctgttttgttttattcaaatagttcttcattggttttaacagaaccatttctttactcaatggtaatccatttggcccaatctttctgcctaactcacttgaaagtcctcaagtgagcaagtctctaaaaaacaaacagaaatgaagaggacattgcctttgattgttttacctctggctacctgataagagagcataatagtctcaaaatctgataaataaatcattttaaggggagtatctttctccacattggggaaaaaataatagttatgtttagattgtcaaatgtaaatgtaaatgtagaacactagtcttcaaaaatagaattcaacccgttagcagaataaatgtttagtctccatttttttaatacttttttctcatcttttaaaaattgtttagtttttttttgtttgttttttttgttgtttttttttttttagaatatgtccgagtctaaaaggctcctaggttgtatgccattgttgtctatgaaagaaaaaccaagggcgatggtgcttgcatttgcagtattcttccaaaacatttttcttctgagtaaaagtgtgctcaacaagtggagatagctcagacatctggaagccaggacttactaaacaagaagatgccagggcaaatttgtgccacagtcaataggtttcacactcttgaaggcatggtgccagttgtcaatatgctttcctgagcatcctttccctctagcatttttcagggacctaccagcacctctctgtcttgctcacttgtacgtgatgtttccctcaagtggtgccaaactgtttagtctcttgtgtatttcactgtaacttcctttgtttgattgactttaaagtagccaagtgcttccacaaagaaaggactgttaagttatttagaaacgaagaagacagtaaaactcctgtttcttttgtttctgctttgggaagtgccagataattttttcttcttatggaatagattttaaagctataaatcttgccattctgttcaacagtcacttttttccttctgctaattaattgtaattttaaaatgtatcagttttgaaatctagagcccccaaagattgaagtttagtaaatttattaaaataaaatgtatcttcatggctcagtaactttcatcttctaatttttttagctactcaaaataattataattttttaattaactattaaatactttacatggctgccatcccctcactctttgctaacagcatagtgcataatgttttaactttaagcaattataaaaatgaaatttgaatacacatactgggaagtaaaaatgactaagccaatttttaaattttagatttaggacaagaggtgttggcatttgatatctaaaaagatagattttaagtagttgttttagaaagaaaatagtaaaaagaaaaattatcagtaaataaaaatagatttcaactcaattatataggctatgctaaagccaatcagacagggcacagtgaagtattaatttaccaactatctaatgtctttggtcactattgatgaaatttgataaatcaaaccaaaaaagatctaaacattttctttctagttatagttttacatgattacattagacaaagtcctagaactttaagcctagaagagagccttaagtattattttctatttctatttgaagtcattttatagatgagaaaaagaggtggcttttgccactaatgacaagtgaggattaaagtacctaatgtactccaaataactttgtaaaatatagagcacattctaaatgaaaagtaattttattatggcatgacttctccaaagtcttaaggtgtattagtgggattcaggtattaaagtataggtctgatcataaatctggcttactgttcatcttcagcaaaaggctagatatgtttgagaaagacatgggacattctctcttttgtttacattgacttttagacttctcattcttcatttacgtttcttgagtaaaaggtatacataagtgtcttaataatttcaagtaaagagaactaatttagtatgcctgaaaatttagtgatcaaaacatagcaagaactagttggagtgagttactttaaatgcccctggttttaatttcagaatttttaaaaaagccttaaatttttgaggcttttgattgttgtttgctttctcactcattccaatgtcaaagtttaggtagtaaaaataccctgtggttagtgtaactgcccttaacttctttctatttctttctttcctctctctgaaactgaagatgataaattggaaagttttaccacttggattgttaagccttgggttctctctgccactttgcagagctgttagcatggaaagttgaacgtgagatggtgattccagtttgaccctctccctacaccctagaatgtttctgcacaatgagccagattatgtaaagctctcacagctcaaatataatttctagactcttgagtcatattaccaagatcctagtggagttaggtacaatggtgttggcagctgccttgtaaatagtttaaatcaaataagtctaattcacagcatatagagacacatttttatgtatttagccaacttaaaatcagtcttagtatgtgtagatccctaagttagctgatactgcaagtattttgccataaaatttggataaataataaactattaatgtaattatttaaatgtcgggaaaaatcaagggaaaatgactcgaggaattgagcatcttgggataatatttattaagggaaattattccagaagatccttgagagtctaacgttagctcttttttctccataatttctaatcattatttacatttcaaagtagaacaaagtaaaagaaaattccttagtatataatgtaagaaattaaaagaaaatttcgaattcttaagtgagtaagaaagcttagtgttttggttattggaataagatacagaaaacctgaattaaaaagctaaaaagtgactgggcgcagtggctcacgcctgtaatcccagcactttgggaagccaaggtgggcggattacttgatgtcaggagtttgagaccagcctggccaacatgatgaaatactgtctctaattaaaaaaaaaaaaaaaagaaaaaaaagaaaaaaaattagctgggcatggtggcacacactgtaatcccagctactagagaggctgaggcaggagaatcacttgaaaccaggaggtagagggcagtgagctaagatcacatccactgaactccagcctgggcaacaagagtgaaactccatctcaaaaaaaaaaaaacaaaacaaagctaaaatgaggccaggccagtggctcacgcctgtaatcccaaaactctgggagccctaagagggcgaatcacttgaggccaggagttcaagatcagcctggccaacacggagaaaccctgtctctactaaaaatacaaaaaattagccggacgcagtggtgcatgcctgtagttccagctactggggtggctgaggcatgagaatcgcttgagccctggaggcagaggttgtagtgcaccaagatcgcactactgcacttctgcactccagcctgggtgctgggtgatgggagtgaaaccctgtcaaaaaacaacaacaaaaaaaaacaaaaaaaactaaaatggagattttattgagggaaaatccatttacaggctaggagaatcatttgtgtataaaaaggaaaggcacagattttttttaaaaaagagagactaaaattgttagtagctcctcttgattaaaacagtggacttccaacttcctctctaccctcaatgtcagaaaatctatggaaaatatggcttaagaatattatcatcacttgagaataaagaaacagagggatttaccctccatcttcatattccattgactagaaaacttccccttggctcaaacatgtcatcagatcagaccctgtgctatgattctgctcctaggacgccaaactgtggggctttttttgaaaccctcccttagctattctaacttccataacattttcaaaggccatcctcttacctatcttatcaattaataccatagctaacattttagttatctgggattttatttatgtctgctcagattgcaagtttgaatgtttgagactccactttccttgcaggattcgggctaatacatgccaaggaggcatagatttctttctgtttaattgtaaggatggaagtgaaaagcaaagaaagtttttgtcagttggtggtagttgatttttggtttattttaaaaagctgtctgcagttttcttgatcatttaagaaatttgttgacatggcacttttaatagattatcctgcttttaaagaatgctggcatgggtaatgacctcactggtgggcacagaacaataataaagatagaatttttttttttgtattttcagaaatttaaagttatgaaacatttttagactatccagtggcaatgtgcatttccagtatacttttgtatgatggtgagaagctagggaccttctaatgggtcactaatgaaatggactccaactcccactctggatctctcactcataatccacaaggattaatttaacctgccagatgctacccatttagcaagctgaaaggacacagtgccccccaatgcctgtagccttgtctgctgttattgctattgctggctccattctataagtgagtcagatgatttagatacatatatgtttactaatgcaatgggtagtttttcttggccaggctcagtatattatttgtgttcttgtcagggagagctaccagtgaattttttcctgctgtattttaacactcaggaactggttgtgcaaagtttatttgcatctttcttgtgcattgcatgggagtgtccttgagaatatcttgtaaacatttgctagtattgttttttaaatatttaaaaatcagtatcatttaatttcagagaatttgcttcaacttactggaattaattaaaaatgcttttgtatttatattttttcttttacatatttaaagtattaagataaagtcattgtctaatgttgtctgccatagtaaaatttgcaaactgagaaaggtcacatactgcttttcaagactctttagggcctttaatacagtgctaaaatagaagaactttgtcaaaaataaacaaaagtatgaactccttggtaggagtagattctctttgttttaaaaaagttaaatacattgggttaaaatgagcaaaatatgagctccttttcgtaaagttaataaaggaggaatagagattaggaaaaattcagaaatttccaatcactgcttttcaaatctaatcacatgatccaggacttcatttcccagaaaactctgcatctgcccgagggaacattagttatgagacagtgcagagatttctaaggcccatttcttcacttaaagtttatgtgctctcaaagcttcctgtggtaccaggatagagcattaaatagcgttattctctttgagttatagctgtttcttatttttgtgttgttagatccaatgtagcatggtaataaaacatatttgaagcatcccttcctgcatacacagcgctcttacctgtgttctcgtatgacactcaccctgaggaaggtcttattgtatccccattttcagatatgaaactgagattcgggaaagataaccgatttgtccaagtcctttacctactaaatgtcaagacatagaatcaaatcttgttctctttgctcaaaagttgagcaaagttgttctctttgctcaaaagttgagttaaaaataaaagttaaagggaaatccacaatttattatattctcgtataacttgttaacaaaacatatcatcacagaattttaaagctagaaatcagcgaagtcttgtttttcagacctcagtttagatatcacctcttagaaagaccttcttttattaccctaattcagctgcttgttggttttgcaatttactatcacaatttatggtttttggttttgatcatggaacttggtttttactgatatctttcattagactgtaaagttactgaagacatgaattgtgtctaccatgttcactagtgaagccccagcagttacactagctgtagacacatggtaggcattagaataaatattttttgatcaattgcatgaggttcagaaacttaatctaatttgtccaagaccaagtatttgttagtgataaatccattagaaccctggaatcctgtttcctgttgtgcggcaatggctacatgtaggggcctgccatgcctaattccagctttctaattgttaggttgcatgagaaaccctcatctggttcccaatgacccccaaagtaccctgaaaaaagggaaagcttattcctacccttctctttcatccagagtcagataacaaagaacaaagttgtcagggaccagtgctttcttcctgtgagcagaaatgtgaagcatggttttggttggggtttttgtttgttcggttggcttttggttcagttttgcaatatttggcttactattctctcaaaaagtctgcatcctgtggacaagaatctaagccctttggagactagcaatggctattccacactctctggggagcctatttatgagcacatgtgtttgtaattcagccactctccatatctgttggagaatagcagcctaattatctgccatcatttggttatgtttttcattcctggcatattggtgacactcctctcacctgagccacatattcaattaattcatatgtgttaccacattgatcttaactgtgaaaatctgagcaaaatgcatacttggtgcagttatcctcatgtcaggtagtctgtggtcagtcacagcttttagtcaatagataaaaagttgtaaagtgtcttaatttgagaaaattggctaaaccaaagaagcatgaatggatagttaccaacagctggatttctccaaatagactctttttttacggtttaacttaagcataagaccattttgagttatggtgcttttcatttgacttgcttcatctatctttctggcaattcttgtttacgctccttagactggtgaataatctaaatgtcaaccagagagtctgaacttctatgagtaactcatgtgtcacataatctatgtgacatagtagtgcatcacacctgcagcagcatgctatgggaattctgtaattaattatatatgctgctgtcaacaatgaaaagaaggtgttcaagtatcaaagaaccaactgaaacttccacccaaaagcaaagccaaagtgagaaaggtaccatgagctcagattattttgaaatttacagataaaacctagcttcaagtacaaatcctgtggaagaaagagcacacacttggtctcagacaccttggcagccacttcacatatgttattcctaatcttcccatttcaaagatagaaaattctagtctctaagagactcaatgacttgctaagtttctcagactaagttacagtacatattttatttccagactcagttgaattctcagatgctcctatgtcatattttatttccggactcagttgaatcctcagatgctcctatatcatgctgttatgacgttgggttagctgaggtcactggtaaggcaaacctgcaaccagcactccctctacttcatgtttgcagtagaagctgcctctataaaccttccgtgaacctaacaaacctatgcatcttgaggtgcattgttgttcaaagcatctctccatctcttctaaattatgatagctaataatggaaaacacaaaatacataacaagcccaactaccttttttaataggataaaattgcataagaaatagctgtctatgaaatttatgtctattttatgttatgaaactattttcatcttttatagttttagttaatagtttatgtgtgcaaacctccaacctgttacaaattttcctcaatttgccggtgcatactctagcttagggattactgaaatatcaaaacagataataatatatatgctttcagggaaggaaaggatagatctatgtagtccaaagctttcttttatttttttgataggccctagagttgatcttgaaaattgccagattaataggctgtcccagccctgagaaatcgctaatctagaagtggcaattcccaaggcaggttttgaagcattccattgtcttttacctcaagggatgtatgaaagtcactagctgaaatcaatacaattaataataaatacaatgtattctacatggtatttttaaggggtagagtaataatctcaaaaacaagctatgatagatttttgtagctgcaaaaaatattagaaacttcaataaggcaggatttaaaacaacctaagaggtactatagactgaaaatggaattaacttcttaaagagaatcatgaccaatacgtaagggttatgaaaagaaagtataatatttgagtggtagtttccctgttctgtgtaactactttcatgtcagatatgaaggtcctaaaacataggtgttatttttcactagtcaggaaaggacactagactggatggtctgtgggtctgatccacagtaagtgttctgattgctgaaaaatactataagttgtagagcttctagctgcgaaatgtttcaaaataaacctttgtcatctactttggaatcatattaatgccctgtggccttagaattgactctagaagctttcagttaaatattagccgttatacctgtacagaaaaagttgtagaaaggcttaaaaggaaaaacaaaagagtgactgaataatgtaccttgattccttgatttttctcagttactatgatgatttttgtcatctgttgaaaaaggtttctgctaaatttaattatcagatcatcatctcaaatcttcaaagttcctttttttgtctttctctattaacagacaaattaaaagggaaggatcaagtatatgaaatgaaattgtgatgctccaggaacagttttaggtcttacgtttctcattggaagaaaagtcctctgtcaaaaagaaaattttgaaaagtttaaattatctaaaaatatacagtgcccctaaacttaacatatataatgagtgtatggcctggaaatccaatctcttcataggctatttgcacatgcaatatcaggaccatacttacagttaaaaaaaaaaaaagataaagaaaattcttctttatctgaaattcaaatttaactaggtgccccgaatttttatttgctaaatctggcaaccttatatatgtggaaacataatatagtttataaatattatatatatagtttaaaatgcatagtgaatgtatcagtctttaggtataaatagttacagtatcttttgtccatttgattacatcactgcagcaactttcagagttgagagaatgttggatcatgagaaattgctataaacattcttatgggaatcactttgggtctaggaaacgtcaattttttagtgttccaataatgtgtgttatatcatctcttgagaagttttcagaaattctgagaaaaatggacagcagaaaagggttagatagataggaagaaatatgtaataatttggggagctgttcaagccctaatctcatttaggagattagttatagagcagctatattcaaatttgtttgatcttttgatatttttcaattctgtatgaaggcattaatggtttttccctgctttgccttttaatatgtcacttgagcagagacttgtcctctaactagcaagtagaattgattctattgttgcttcatcataatttttgatgcagaataatggtagatatattcatgcttgtttttcgttgtatacttacctattgattactacgttgctgagcagttaagacaagaagcactcaattctaacatgtttagaagagtttctttctgatttggcacatggacagtgagaatgatctcactgtgtttgttccctggcacaccaaaggtttgctgcagatgttagtacagcagaacttgtttgctaagatgacccattatggaacactagctgattaagcagacgttaatggacaattgcatgtccattattacttctttgaccatgttaccaactcaattcaattgcacttgcttttcaaataagacaaacctgtcaataaagaaactggacatcaagtttcaaatgattggtagagtttatagggaaacacaaaaaggagggaagagatgagatgcacattgtcaaataatctgaaatgttaagaattgtggaaattgttagtttcataaggagttttagacaagcacactatatccctcattctgtttatttctttttcatttaaaacttagatttgctttacttctttgggtcttcatttcttcccatgcaaaattcctgaaagtcaaaaggaagattagaagctagccattttaccactaaagaaactgagccccaagaagttaattcagcttacccaagattacatatttgcttagggccagagctaagacagggacagactctgtttacttcatttctcactaaactgtaccactgcagtttcgacttctttctaccactgaaggcacagaatgcactgaaggcattctgtgccttcaggaggaattttcagccccttcactttcctgatgcccgggaattctttttaagttatgactaacaaagtataaaacatgagtcaaaagttagtccctaataaagtcattgtgactttaatgacttcggcagttgtttcattctgcaaaaacaggaagatcccacacaataaggcgcctgtctcacagctgggctcctgcgtagacggccacccacaagagtaactaactgctggggctgccttcctctctttgacacctttttattctctgttcttacagttttctcctactgacctcatcctgaggttatccatgagaggaaggtacctgctttagctagtctttgatagggtgaagaatagttttaatcacttaggagtcactcctaagtgattttcaggtcaccctcaacaggcctaaattagtcttagaagaagctctttcatgggctttatactagcttcctgtgttatcactattctggactgttttattctcaaaaacataaaatccccaaattttagatttgagaagagcctgcgatcattccagttcactcctcctatgtgattagtttaactaagaactcattaccaagatagtgcctatcttgcctgcggatctttgcataaagctcaaactaattctcccatgagaaatatagaaaagtgaagaagtgtcctatcacttcagaagaaactggctcagaagaaataatctctgtatgcagtgttaaaactaaagaaaaattgaagccatcaaacaaaatgttcctatcaagtgtaattgaattttagcttttattacctattctctacttttaaaataacttttcactattaaaggaacttattccaaaaatcagacaattttatagaaaaggtatattctaggccaataatattaaatcacatatctagaaaatataccttcttcccttttcaaaaaatagaagcaatttctagcagtgtatgtgaatctaatgttgggcataagcttaagaaggcatcggaggaattttttattagagtttattcacaaattttgcttgtctgtgttgaaaaggggcattggccatttcctctggggacattatttctaggtaggctgtaacagggttttcctgtgaaggcagattcttagggaaaatagtatctgtgtacatgagatggtagagacacatttatctttaaaataatgtgttcctgtttgtggatttctctactgaatttaataaagtaaataatgcccatttccttccaatccagtaactccttgggacacagttttacccaggagctattttaccttcgagtctggatgaaacgtgtaacttaataaatagattccaaaagtcttacactatgaaactctgagggatgataaatgcttcccttcctttgttatggtctgaagcattttcaatttgagttgttttcctcagtcatgtagagggagttttgttttctgggaagtcttggttgctggtaaataatgtgtccaaactgtaggaggcagccacagaatttatcatacaagtatgaaatgttagggttgatcattctcattttacacatgagaggtgatgtaactacacaggagagtgagagctgagaatgaaaagtcaagatttgtctactacattgtggctgcctctggctcaacagaaacactcccatgtgggagtcagatgctgaaagcccaactaagcctagctcctcaactgtctcctcaggcttaacttcaaacataattcatatctattctatttcttaatgtgtctcatcacacagttaaacactagtcatactaactggactctacatatactagaatgtaaaagatacccttccaccccccgccgtctgctccttgaaggccatgtctgcctttcttagtttgtacagagcccaacataaatgggcccttcataagtgctttttgatgagagcaatgattgctttcacatcagtgtggttgggccctcccttatggaggaggaaaaccaacagttgttgctaagcaacatttaaaggactaggttagtttctgacactaagtgacctccatttgcatacttcgccatgttgtgtgttttatggttgccttaagatgactatgttttttggtagcattgctgtgcccttagcaaaaggctcataggagaattagtttaagcctgggaaggaggaaggtgatattcatctgttaatgacttgcatgagtacactgatcccttcagtaaactatgcgggaaaggtgaggagtttggtttattttcagccctgcagctgagagccacctccctgattccatattgaaagtgattgacaatgtatcccaacagggtcctgtggcaatggaagactatagaaagaaaataaacagagaaatctttcctcttatagccttttatgattcagtttctacctgctcctatcttctgagcagagttgccgatatagctagtaaagaactggtcctaccctctctagactgtttgctgttgtggttaaacaacatgccctaatatatctattcctactagaatgaaagctgattaaaagcatgaaaagagtttttgtttgttcctttgtttttttttcactgctatatcatcactcttttccctggtcattttaggtattcaataaatggttggcaaatacgtgaaaaaagggcattattgaactactacaaacctgattgactctaaaacattcctaagtatttcagagagactaaaggagccaaaatgagacaattgtttgaatgttatatttgcctaagtctagtgcagagaaaattatggaagaaatcatctgtctctaagctttttacaacatatttttacaatgatccaattaaagttcacttctttgccaaaattcagcttatcggtcagagcatataaacttgttttcttcagcttctgagtcttcagcctaggtgcctgtcttttgaggatttaaaatgagaggccattgtgactgagcagttgtgtctttaaaacgaaataatttggaattcatgtgattcacctgggattcaaaattgcacagaggttcaataagtaaaatatgctagctgagatgattgattcagagatgcctggttacaaacatattgtatcatgggaaacacacacacatacgcaagcagggttacccagaaggaggatgattggacatctttgagaacaatgcctggtgcagtgagccagcaggcagaaatactggcttgcattggcttcacctccaaaagccaggtctcctaggcacaggcgatggcatgactccgggcttggatgcttgaaataaagctattgttggatgcggatgctcatttgaaaggggaatgcctcacaggaaaaagagccaattgcaagttggggctgttgccatggtgctttgctattccttcaacttgctatagatgaaataaatcctgggagtacaggggtagggtaacagaggggaaagatgaggagggaaatggggtgaacctggggcggggaatcccactgcagtaaagctctagtgtttccccttgcctgtgctttaacgctgacaaggagaagggaggggctgggaagaagggagagagaaacctgcagggaaggaatgactttctcaacatgccctggattgctaaaataaaataaaaattaatttaaatcctcagatttctaatgtgagttagaagatgtaacactaaatctcaaacaattcaccattctttcagtaaatgaatgttcatatttcctaacacactctggatcctagatggaaaggttaaaagagtttaatacatttgtcgaatgcaatctaatatgcatattaatgagctgatggagggcagaaacttacatgctgcataggaagtacttttcaaataaaataaattaattccattcccattcattttactatgaaaagaggctaaatgcactggcacacgcttggtgtgtgcgacaaataatcctccaaaaagctagttcacaaaaattcttgtgtactggcagcctagtctaaaaacagccatggtcctaaccttttttaaatgtttgcttaaatgttcagaaaatcgattaatcaaatgcatcatcactttgatcaattagagcggctggatttttgtgcagaggctgcatctgcagaattctggtctgcagtggagagagagggttaaggaacacctagttgaaatgggggagggtactgacttcagatttacttaaatattcatggggcttcctccattttaatcttctcctttttaaaagatggctgtgtttcctagtctggcaactcctcaggaaagaagaatttcttcttccttgcagagttcagctgagtaggactaatgtagaagagtggaaaccccttcggccaccagggctattcataattcataagtgcttcaaaccagccagctgaatacatttggacaggctcttgctccttcgtgcaattcctgatttcattactctcttctgccaggaaataagcagggagcataggcttcttgcaagaatggagtgcgaagatgggctttgtttggcttaggaaatgccatacattttggaggtttttgtcttttctaagttttgattattttatcactgaatctgcagggctttcctgatcctttcgggattgctctctcagaactgtgaattctttcaaagggatttgtggattgtggcaaggagagcattccaaaatgcctgaggcaaattatttgttatctgtatcttggggttacatcaaggtgggttaatttgattgtgttctgtgtctttgataaaatgtgaaacgtacctctgtgtgtttttttgtgaagtacaggacatctgtaataatttgatttgtgtgttcatttaacccactgggacctcttattttgaaataagagcatgttatattacattttatttaagtgtactatgctgtgttttaatcctgttctttttactgaattctgttttttaaaagatgcttctttttttttctttttcccttgaacttttcacatataatctcctctcaccaaataggttattaaattatattttagaggtaatttcagacaaatgtatttttaaaagtaggtacagtttcaagtggaattatcttgacctctattaaaattccttttcctatgtttgcatcttcaaaagtaatcagatgttaattctaagaaatcttaagaaaacctcttttccaaaagtgacgttggaataatttcaaattgaagagatatattttgtagaaacagtattatttatctaatggtatctgctcatccaacctcttgattcctggacagtaaagttggaaacatttaaaatgaacatttgctctttttaaagtggttaatgcatttttgttctttataaacagttcaaaagaatgctgaaccgggagctgacacacctctcagagatgagccgatcagggaaccaggtgtctgaatacatttcaaatactttcttaggtaagatattaactgggaaaaacctgttttataactggggttttcagaattaatttctacaacctatcaaggacatcctcatgtgaatttgggatggagttgagtcatagaaaaatccatttaaaataataactaaggccagtcttcaaaagaaaaaaaaataagcaggaagatcatgtttttgaaaaaaaagaattaaaatacccatccaagacagagggttattatgggctaattgtatttaaacggccctcagccccaccttgtctgcctgcctacttccatctttgctaagacctctgaagtaatgagggaaatccaatcacccaagccctagaggcagctccattagcttctctgacatggtagcctttcacttcctccaataactgagctttgagcaaaaggtttcctctatgatgttttgtaggggatatggttgaggaataattctatagtgatttggtccttgagaataagctttggaaataatttgactattgctttgctaagttatttattaaagaaaaatggatggtaagggggagaattttaatattatctgaaggatttcatcttctgcaagcagcctcgttctcttcccaatctgatgctttatctattattctctgttgttacattactggtatttaacacatgatttgctgaccaaaaagattgcatgaatggtcctcaactattgtcatgcgtgttatttgattatttgggatttttgaattcagtcttaaaggcacttttgtctaacgaacctatttggactattttgatttaagaagtcctacagaatctgcaaatctgtacatcaaagtaaatggatagcatttagattctgattttgttgactttatattgctactgaattacgcttgcttatgaaacctcactttccagggaagcgacccattctcacagctgaacactgcatcctctcttctttttggaatagccatatggcattaaatcaatgagcattttccttgatgccttactgaaacaaataccttttctggttttatttctaaaatcaatcctatttctctaacaccaaagcagttcttgctatcagcagatcaatcagccctctctttgagcagcctcatacagagcttactgcattactctgcagtggatggtcaccagacgtgattaacaagtgcctttctaacagtttctagtatgtgagtgtctgcagcacttgattttctccagctgcagttgcaacgcctttgtcagagaacaaaggagaagaattttcatccatcctagctcccagaggtgcctggaatctaactttacagaaagcattaaatactgatccttttcttctccttttatccatttgaagacagggatcttctgctgagcatttcagatataccctgctctgtgtaatgcccaacgatttttcattagctgggagctgttttagggacattttacaggttaatgactgtgggagaggagaataaaatcaaaactgcaagaacccatttttgtcttcataagcattgcattttaaaatacgagggcttgaagacttctcagaagagacactcactactggagttaaagttatatgaagtccctgagcccttaatcatccaagactggacctaagcagtcctcttcgtttgtagtctctttcaatatctgcttatcaaggacaacgagaatatcttagtctactaattaatcttttttatcaccatagtctaccaagaaagaaagctgataagataataaagatgattcattcctcagagtaggaaaaaataaaaagaaaaatttaaaaagatgctaaatatgagcgctgagtctcaacactgtctcaagatgaggcagatgtcaactttcttgcctattctgcttgctatttaggcatatctcttgagcaaaaccagtcatttgtcttctcattgttccaaaaattaaattcaagaacaaattgttgaggaaggttattagaatctcaatccttatagactcttagcattaagagggtggtgtgtgtcagtgggtgtatgtgtttgagggtggatgtggtaaaccccatcaaacagactagacgggcagattagaattttaaatgttcttgagaaaatataggaagaaaaaaacctgtaatattaacaaaagatgcatcagttgcctcacttgtaaaatgggaacactggtatagatgacatctcaaatcccttccaactctaacttactataactctgatatgaactgagtttatcagttttgctaagacatacctggccatctagattctctgtggtgaaccctaggcttgtaatctgacaatctcaaaaaacaaataaacgaagtttgtttccagactgccagtgaagggcatggaactcttagtcttatcctgtgagcatgatgaatgttcctggaagaccataaagccttcttcataaactttctgatctgcatgggaccataaaaccttgtagtccaattccctcattttataggagagaaaacaggggacccagagggatgaggtaacttgaccaagatcgcttggctaatactttcctcagccagaactaggacttggctttcttggcatctagacctaaataccctgtcaatcctttaacgaggaaagaaggctgttaggaacgcagaacatatagaagaaaatcacataaggactcttaactgatacatatatcattttggaaacaagtctttaggaatcaggattgttggagctaaaaataaaatgtttattaacaggccgggcgtggcagctcatgcctgtaatcccagcacgttcagaggccgagatgggcagatcacctgaggtcaggagttcgagaccagcctggtcaacatggtgaaaccctgtctctactaaaaatacaaaaatagctgggcatggtggtacatgcctgtggtcccagctactggggaggctgaggcaggagaatcacttgaatccaggagatggaggttgcagtgagccaagatcacaccattgcactccagcctgggcgagaagagcaaaactctgtctcaaaaaaaaaaaaaaaaaagtattaacagtttctaataatataaaaggttcctgtaagaccatggcaaccacctcagtgagcacaaaataagaagatcttagcaatttaccttaaacttgaagagcaatatttcaataaaagccattaaatgttaaaaatgtgtcatccagggaggagggaaatcccttaatccagagataggtgaaacttgtgtcattcctatcttttaaaaaaaagtggtgcaggaggacagggagaaaggcaggcagtagactatatttaccagtccaggcactcattgatgctgtcacataatgggctccaggttgctggtgcaaggggaaatagaagtgtctaatttcaagggaaacaaagcaggacctagggagaaggagaataaataatgcaagatttttacatgttatattacaatttagttaatattttcatgaacagagaaaagttatccttttaaatcctctacttaccctctcaaaacctagaacttagaattttcaagatgcaaggaaaagagcttaggaattttgcataattgaaaagtgtgatctagcaagacatgagcctcaaattatgccattaacagaatttggatgagactacttttttatccgctttttgtttgttttatacaggccaactgtttgctcactgtattctgactattccataaatgtaaattcactcagtgtttattgtgatttttttgagtctgagtttctgattatttccacactgtgctggctaagcatttaatagaggaaattcagaatagggaaacctattagttgttccaatgcctgcatagggaaacacccattaatgtcaaattggcactatttgtgaataatggtcttcttcattattgcagtgttccagacacagtagtggttcagctcaattactcactgttgcagggaatctttaattaaacaaagggaaaaggctgctggtcctactagaaatggttatatgtgcagtgacacaggagaatctaagagcctctttaaccggaggtgaagaatggtggtaaaaaggcaggccctatggtagcctttcattttagcaaaaagtagtagttattaggagtaaagtgacagggagaaaagtaatttcaaactaatataatatataggttttatgccagagattgtgtggcaggaaaaagatttttgacaggaacctcaaggcctgggttctatgctactaaatcactgtgtctggagcaaagtaattgcaaaataaatatctgttaaataaattgccctctgagcttgggcaagttgctgacttcatctgaaaaatgagagtgtgggattgttattggttcttaaacctggctctgattatccaagtcacttgggaatcttttaaaaaaaatactgattcagtaggattgggtggggcttattcagaaaaatctgtatttttctgaagtttcctgggtgcttctgatgctggactaggttggaaacccctaaactaattgagatgaccactaaaattccttcctaagcaaaagtcataggcttgtgagtgtaggagcttgtggacacctagagacaatactgatatgttagggatggataattcccttgcttcagtcccacagagagcaggtgaggtataccacgaagccagtactgtctcactgtgcttgctttgctctgatgaagtgtccacaggggcctatgagcagccagaggtctctggggaaaacatgtgactgtgccattatctgcaagagtcaaaacaaatcgtctagatcccagaatgccatctgggagcatgtcattttcaaatggcaaagttgtcttcctactaattttcactgtaaccagcggaggtaaatgtaggtacttttgaaagctgcattaactctttcagccacagggtgtcatttagttcaataaagtagtttttatgcaatttaataattgcctctgtgcacccaccagcatccctgtggcctgaaagagttaatgcatttttttcagaagtactgaagatacatctccctgtgaagtgaaatggaatatttgatggctgatatttttaatagcacaatgtaaaggaaagagcttctataagcaggtaggcactttttttttcactaatcctagctctgctgttaccttgttgtaacataattttaaaaaatattatgaagtatcataaatatttaataaccttaaacatgttaataagtgtaatgcttattacaaacaagaggccttattgttattatttattggtagaattaatagactccaggcatgaaataaaaccaaaattatagtcttcctctaaacctcaaatggtaataaaccaagcccttaaagtaattgtttgaggattatgaaccatttatatttctaacatatatactgcttatttaaactgagcccttgctaaagccatatggatttttaaattttttttaagtaaaaataagatgagcagatcatgaagcctgtttttattaatctgatggacattttattatacaaaaatatgttaatccctttatttaaaaatctacatataagtattagtgccccacattgcaaatgtataagtgtgtactccttatacactccttatatacccctaaattacactgaaaacagaagatttggtcttgggtcctatttttgctgctttctggacaagttacttcgttcctctgggccttaatttgcctagcaataacatggaacaacaaatcttatttttctcaacaaattttatattttccccacttactttatagaactgccctagagatacagtgaaatagtgctacaagattttattttataagattctaaagctgttatagatggttagagttgttttgaatattgcagtggattctcatagacacatgtgctgaaaaacatattcctttgtctgttgcagacaagcagaatgatgtggagatcccatctcctacccagaaagacagggagaaaaagaaaaagcagcagctcatgacccagataagtggagtgaagaaattaatgcatagttcaagcctaaacaatacaagcatctcacgctttggagtcaacactgaaaatgaagatcacctggccaaggtgtgtataagctcaggttttgtgcatgtagctctctgctttacagcagacggatgaccgtataccttttagaaaatagtatggattgcttttgcattattattacattttgtgttagggaagctcatatgaaatgactttactgtgagcagtaaggccttctgaaagctgtcatttgaggaaggttgattgaacatgagaccaagtcttgggggatagcctggatctcttatgctgggtagccattaagaatgccattgttggggcatctgatggaagatcctttttccataccaaagaaccacttttttttgttttgtcctgagttaggtttttatggacagttcattatgaatgaagaatccttctgaagagacatggggaaaatccaaggaaaggtcaataggcaggtctgaattatcccagaggacatttcagggactgtatgccaaggaccaatgggaaaatctgcactaatctgtagtgctggaaaagaaataaagagaaactgacagcactgactctggagcccaaactccagtagtggagggaggcatagaaagaattcatacatcctttaggaggccacacaaagtgactgctgaggtcctctcagccttgtgagaatatgaaatgagcttactgtgagcagtaagaccttctgaaagctgtcattagaggaaggttgattaaacattaggccaagtcgtggtggagagcctggatctcttactctggatagttactaagaatgaaataaattggtccttaaatcagataaccttggaataatctcacaacacaggcctgagtgatgtttcttccaggtccgtctgtggcccaggagccctaggatgtaattcatgactggcattcttcatgaccttttacattcaattgggttgacttatgcacattctgatagctgagtcttcctgatctggccttcagtgatgataaccaaagggcagaggagttttccctgagactgttttccagctgtcactaatgggccagtaagcagcaaggggagagacagggacattgaactagagtgatctctattcacttgtggccacctttgaaagcaacattggttgaagactgatgcatgtccaatataggtcagcaactaaatttataaatagatactttcccttttcagaataaaaaatgttcagaaacttgtagctatcatgaagaggacacccgacctcctaggccatttaactttcagattttcacacaactaaagcactctaaggagacactctaaagacttaaacagccaatgtccaaaaaataaattaaaaaaatgaggcatgttagcacaactttccttattcctaaattcctttaaatttttaattataggagctggaagacctgaacaaatggggtcttaacatctttaatgtggctggatattctcacaatagacccctaacatgcatcatgtatgctatattccaggtgagtgaacaggagtgaatactggctttccaattggatggctctttatgattttttttttccatcttacttttctgatttaactttcctcgacttttggacatctacttatttatgttctaatccattttacaacacaggaaagagacctcctaaagacattcagaatctcatctgacacatttataacctacatgatgactttagaagaccattaccattctgacgtggcatatcacaacagcctgcacgctgctgatgtagcccagtcgacccatgttctcctttctacaccagcattagacgtgagtagttatgacctgttttgcattcctgcccatcctccttcaaaaatgccatatcagctggatgtagtagcatgtgcctgtagtcctagctactcgggaggctgagttgggaggattgcttgagcccaggggttcaaggttacagtgagctatgattgctcccctggactcccgcttgggcaaccctgtctctaaaaaaataaaaataaaaaaaatttaaaaagtgccttacaatatacaatatacttacaaaattaatgtaattagaccaccctgcatacttgaacaggttctttataaaatgtatcacatccattaactgagctatttataaaaaatgaatgacatttctacttgttttgctttctaatatcagagtaaccttccctttacatctcttactattaaaagtatttaactgtaaagcaattaacagaatttcagggcaggaatcatgtcttattcttcattgtatttctactaagggatgcagtgtatctcaaaatgtcttgttcagtgtccggtaaatagtatattctcaatatgcaattacttatctgaactgcccaatgccaccctaggtatatatagagcactatattccaagggggatatcacagaaatataaaatactctctatatttcttattagtaataagcatccagaggcttagtctcctaaaaaattataaaactgatgcaatgtgttgaagaagtagtaactaaaaatctagaacagaagaattaatgatgctgaaacaaggagaaacaatattcatatttgccataccaactctgagaaggtggccgtggctcccttccttcatagattaatgcatttgtgtatactgatatcatcaacaatgtgtacagcaggtcatactcttacttgacaaatgaaaatgatggtcaagtactcccaaaatgtgctggaccactgcaggaagagactggccatgccctgtccagcctcacctttacagattcagtttggaaggtgaaaaaagattggccacaacttttttgtggcaactctattgcttgtgttgcatattttctaagaaaagaaatccaagaaatcttgagaaagtgagatggagctaagggtgtttgatccctctgaaggagagaaagagtactgtttttataccctgtgtaagtatcatagagtgaggcaacactatctatcaactgctcactgttattaatagtatacctgctgtgtggccagaaattgacaatgatgagtgctgcaaactttttagaaaagggagagctcaatgagtgcttgggtaatgtgattggtctttataggagaggtggaaacccacctcaagctggcatttgaaggaccagaagatttaactaatcacagaggatgaggaaagacatttcagctctagaatgagcaccagtatataccttattaatactaggtttgaatcattgtgcatgggtgggggcagagaagcattcatgacatgacatgaaggaattcagcagtggggcctcaggtttcacttcttagaaaggttctcaaatcttcccctagtaagtgattagtgggtacgtactgaatgaatgaataatatctgaaagcttgtgaccacaccataaatttagctttgggaaataatttattgcttatcttatgaatcgggagtttggccatttttctctaagttattcagctaagagtatatgaaggttgttatgtctcagagcagagccagtctgacttgcttctttgacttgtatctgcttgtgttacataagcaccatgctgccacatcactggtccaagaaacaaacattagacgtttacacactccatgagatttgtgctaatatctttccaagcatcagcctttaggcttgatgtgagattgagctctggccatcatccctttcacatcagagactttatgatgatgaacagaatctacatttacttaaattagtatattgagatattacataaatcaacaatccctctcccaacaagaataaagtaggatactttacaaatgaaactgaataagcaggataggcgaattggatgtgtagttaaatgtgtttatttgcccgacaggctgtcttcacagatttggaaatcctggctgccatttttgcagctgccatccatgacgttgatcatcctggagtctccaatcagtttctcatcaacacaagtgagttcaccactacagcagtcattccagataattgtatgattcactgcttaatttttttcctcctaatgttttcattatggataatcacaaggataataatgaggcaatccttccatttctctcaaactggtcaggcctttcgtggatactcagtccaatctggcaacacaatgtttgagctgcatggagaacttggagagggtcataggggagccataaaaagtactcaaaatttggcaaatacaatatgtaaggaaagaataatagatatggaattattcataaagaacaataaaaggtttggggatcccatgataatgactttttatattatgcaaaactctcgcacagagcatagtaactcactactgtccctatctgcttgggaagcagccacaaatgttgaatctgcacatgggaacctccaggtaaaaataagatgccataaaaagcactggaatgagtttccacagttcagaaggaagggtcattaaaagttccatacattttcttccaactgcatagatttgattatggattgggagtagcaatgacctgagtgaccaggggtggtctagccttaggattccaagccatactcaaagcttttgtcatgcttaaaatgtttagttttcatacctttgaaaatccattcattttctcaaataatgtactatctctaagtgctggaaatctaagtactttgagaatattggttattgtagtcatgaataacatcaagtactgacagttttctagaaatgctttttgagctacttgctgtaaaagagtcctgatcatcagtccttgacctttatccaaagaatatctgaatgacctaggtttggagtacactgggtccttttacttcattcttctgttgaacaaacaaaatgttggggcagctacatgtctgcatggattgtatcagttggtagaatgtggtgtcatgaatcatatataggccagttagcctcacacagaaaaatggtctatctaccacagtcacctatagcactgcaacatataaagcctgcttgtagatctgtggccttgatcacaggatgaacaaaacaagagtactcattggaggttgtaactaagagcacactgttaaagcaatgatatatgtgtaacagaacctgtaattaagtaacacattaccaccacttgtctggtattcttgattaagagaaaatgtggtttcataagtctgatgaccatattctcaagcagacttctgtctaacaaaagatgcctgtgattcttctatataaaaggcaggctggaagctgcagcttaggtttccagatattgcaatttctggtggagagagccaaaagacagaaaatttgacatcagaattgttcccaaaaagtagtaatgtttagtatcatattaatagaaagctctaaaaagtgacagtatttgggtaaaatgaagttttacatcaagcattatctttaaccatccaaaattcacaattgccggagattagggagaatgtaaaatgtgaatatagcttgaaagtctcaatacaattcataaagtttagtggtactttcatgttgttcttttccaaagtacaaaatttttgaagatacataaaaataggatttagctgctcaggaatgcccttacctaatattaaattcttcatctgagatatagaaggagtaaaaggattttaaaatacaatgaattttaatcacagggaaagcttatacaccagtagaagcattttttgcttagaaactgatgacttctgtttgtagagggccactgcttctctaagaggaaatgacatgtagctggtggttcttgaaataatttggagagaactaggtctgatttcactttgagataatgccaacattcaaatcatatccctttttaattaagtcatcatttggtctgatttattagattcagaacttgctttgatgtataatgatgaatctgtgttggaaaatcatcaccttgctgtgggtttcaaactgctgcaagaagaacactgtgacatcttcatgaatctcaccaagaagcagcgtcagacactcaggaagatggttattgacatggtaagactttagcctctctacattcctcacttactgccattctctctgatagactgaatttattaagagttttcattttctttttacccaaggtgttagcaactgatatgtctaaacatatgagcctgctggcagacctgaagacaatggtagaaacgaagaaagttacaagttcaggcgttcttctcctagacaactataccgatcgcattcaggtatttgaggaaagtctttgatttaacacaaaaccaaaccaaactaagctgaacaacaattagaaaaagaaaacaaagataaattcagttattggtatatcctaggctactcctatagcttagggcttattttaagaacaagctaaggaaaatggacattcaagtttatcttctaatttatgaggaaaaataatctctatttgtggaactgcttattagttatataaataaatcgcaaaatctatttgtaatagggcatacgtgactgttggttccaaaagcttgtgtttggatttaaatcccattgacttgaagtttgttaggtctgttttggatatacaaattgccatcagctgttctcctctttccacaagtggaaaatatgaagttatctactttgagtaattctttgcattctttccaaactgagaaaaggaaatgatagcagcatctgacctctaatgttccttccaatttttaaattcaatgactgtcggtctaagaagacacacgttttcccctttgggactctataaaagtaaataactgacccaggctagcatcattgtaattccattttttttcggtgcatatgtcataattataatgcaactaaaatgttctcgggtttagtaccaagcgtactagtatgagaggcatgagatgttccggcagtatttacacctaattttatgagatttccaaaacttgatgatttcaggtccttcgcaacatggtacactgtgcagacctgagcaaccccaccaagtccttggaattgtatcggcaatggacagaccgcatcatggaggaatttttccagcagggagacaaagagcgggagaggggaatggaaattagcccaatgtgtgataaacacacagcttctgtggaaaaatcccaggtatctaatatgagattttcaaagtttttgtgagctctgctgattatagagctggagggttctatttaattccgtttttccaatagaatatgtatatatgaaacaataaggagacaactacgcattttgttccattatagtcaggactcatgcgacttctccattacactcagtttcacagggtggggaaaagtagtcatcagaaacccatcaaaatttggactatgtgtccctaaatcatttagatagttgtctctgatgttagcaaatccagctgaataatatgaacatcagtgtctcctccatcccaaccctctggatttctcctagctctgtcttcattcaagaactctactcctcatccttgcttccagccctctgtttttatcttctgtccttaatcaagcccacggtgaccatcaccagaggcagtctcttttactgcatagtcaaagccctgtcttgtcttccctcccaaggatgcttctatgcttttgagaacatgctgacattttctggttgtgtccaaagcaacacattctgtgtgtgctcaggacaggggacaatagtctggaggggtgaatacagaaatgtccagatgccaatagctgcagaatatgcagcaatggaaagtatcagtatccatacaaagatttttcaagaaaacgaatgggctgagccaagtagctgagattgagaatgagttcatagactgtccaagatctttatcccaaaaacatttggattgtttattttcagtatttatcctctttccctactacctggatactccaaatttgcatatacttgtaatattaatatacagttcctttgcaatatttattttgttgcttcttagagaaacccaactaaatgagtttaaaaaatctgtgaaagggctgggcacagtggctcatgcctgtaatccagcactttgggaggctgaggtggacggatcacctgaggtcaggagttcaaaaccagcctggccaacatggtgaaaccctgtctctaccaaaaacacacaaaaaattggtcgagcatggtagtgtgtgcctgtagtcccagctactcgggaagctgagacaggaaaattgcttgaacccaggaggcggacgttgcagtgagctgagattgtgccactgcattccagcctgggcaacagagcaagactctatctcaaaaaaaaaaaaaaaaaaaaaaaaaaaagaaagaaatctgtgaaagtgctctgaagtctaatatactgtaaaaatgcaagttaacattgttaatgagggttaattcgaatagcccaaaggcttaagtggaacaagatatgaatcagtaaggaggaataacacccttttattaatagcagtgatgttttatgtttatatgatgttctgtggagcatttcacacattttccatacattatcttacttggatccccaaacagccttgcaagatagataaagtagatatttccccagcatgtcaggtgcaaagctgtcctcttggtccactacagcagctctctcatccaaagctcttcactctccatcttagggacaggtcttcctgttgccatgacatcgttatccactctggtatttcccaccaatgggctctgctgaacactgtctgattggcccagcagtaaagctctttactgggtgctctcaggattcatacagctctctcgtcctgtgatctagggaataaataactagcagctacctttcaaaaacattctcagcatttcttagcagaagcaaaacaagcgaagaaaggaaatgactgcactgtgttcagcttattcaattttctccattaccttgagcttgttattttgggtccctggaaaacaccttgaaaatagtctctaacattcattaagcacacataaagaagtaaaagggagggaaaaggagtgggtggaagtgagagaaatatctgaatcatgtacggttgagtttttgtaaccagtatagatcagagattccctgactttgctgtgaaacttcctttttaaggctaggaaagcaccagaaagaagaagaataagaaaatatatatatatcatacatatatatatacacacatcatacatatatatatatatatatacacacacatcatactatatatatatatatatatatatatatatatatatatataattttatttatgaaagaatcacatatgaccaaagttcttgtgtacagtacaacttggatgtattaaatgactggccaattaccaacatgttaataaaggaaagtttccagtagtgtggaaagagacctatataatgtcccatgggtgggtgccctttgaccatctacccctaaatcccaatgcagcatctctgtagctccccagaccatggcaggggaattcccttccctcattcaactagtgcctgttctttctctctacttgtccccacccccagtgtttcctgtttgtccaacaatgaggaggccagcgtaaggccacactgctagctcatgcaggatgcatagcccctgagtaaaccataacagagccataagcctggtatttaatcacaggaacatcagcaaaaggaactgcttaattgttttttattttcccttctttcacctgttggaaatgactgcgtgctctgtagatccaaaacaattgcatggatgtccaccgaggggatatgtgtttctttcagggctcaaagtattttcacgtgtttcatcaaactcctctaccagccaaaagcattccacagaacttgagaaattccagagtagtcaggagccagctcctcatcactttggaatagcaacatattttaaagttaacaaggaaaaaatattgagtcaaaacacgttagacctgggcctgccttcttcagaaaatgactcacagaatccaagtagtggcaaagtcattctttgtctttgggtccctggaaatcatgaggattccatccagacttcttatctggcgcacataaaaggaaatgcagtctgttgtagcaagatgaacacgggctttggaatcagatgaagctgggactgagtcccagctccaccagtcactagttatgtgacctctgacaagatatttaatctcaataagtcgtagtttctgcctttgtaaatagtaaacagcaatacttaccttccaggattaagagagaatacatcgattgcattcagtgtaagacccactgtattgtgaatgcccaaatcatggaatccattatgattgatctttctgaagttattaatgttctttctttgcatggaaaccaggaaaccttgtttacttttcaagcaccatcacaataacagatgtgtcatcttatttttctccaggttggtttcatcgactacattgtccatccattgtgggagacatgggcagatttggtacagcctgatgctcaggacattctcgataccttagaagataacaggaactggtatcagagcatgatacctcaaagtccctcaccaccactggacgagcagaacagggactgccagggtctgatggagaagtttcagtttgaactgactctcgatgaggaagattctgaaggacctgagaaggagggagagggacacagctatttcagcagcacaaagacgctttgtgtgattgatccagaaaacagagattccctgggagagactgacatagacattgcaacagaagacaagtcccccgtggatacataatccccctctccctgtggagatgaacattctatccttgatgagcatgccagctatgtggtagggccagcccaccatgggggccaagacctgcacaggacaagggccacctggcctttcagttacttgagtttggagtcagaaagcaagaccaggaagcaaatagcagctcaggaaatcccacggttgacttgccttgatggcaagcttggtggagagggctgaagctgttgctgggggccgattctgatcaagacacatggcttgaaaatggaagacacaaaactgagagatcattctgcactaagtttcgggaacttatccccgacagtgactgaactcactgactaataacttcatttatgaatcttctcacttgtccctttgtctgccaacctgtgtgccttttttgtaaaacattttcatgtctttaaaatgcctgttgaatacctggagtttagtatcaacttctacacagataagctttcaaagttgacaaacttttttgactctttctggaaaagggaaagaaaatagtcttccttctttcttgggcaatatccttcactttactacagttacttttgcaaacagacagaaaggatacacttctaaccacattttacttccttcccctgttgtccagtccaactccacagtcactcttaaaacttctctctgtttgcctgcctccaacagtacttttaactttttgctgtaaacagaataaaattgaacaaattagggggtagaaaggagcagtggtgtcgttcaccgtgagagtctgcatagaactcagcagtgtgccctgctgtgtcttggaccctgccccccacaggagttgtacagtccctggccctgttccctacctcctctcttcaccccgttaggctgttttcaatgtaatgctgccgtccttctcttgcactgccttctgcgctaacacctccattcctgtttataaccgtgtatttattacttaatgtatataatgtaatgttttgtaagttattaatttatatatctaacattgcctgccaatggtggtgttaaatttgtgtagaaaactctgcctaagagttacgactttttcttgtaatgttttgtattgtgtattatataacccaaacgtcacttagtagagacatatggcccccttggcagagaggacaggggtgggcttttgttcaaagggtctgccctttccctgcctgagttgctacttctgcacaacccctttatgaaccagttttggaaacaatattctcacattagatactaaatggtttatactgagcttttacttttgtatagcttgataggggcagggggcaatgggatgtagtttttacccaggttctatccaaatctatgtgggcatgagttgggttataactggatcctactatcattgtggctttggttcaaaaggaaacactacatttgctcacagatgattcttctgaatgctcccgaactactgactttgaagaggtagcctcctgcctgccattaagcaggaatgtcatgttccagttcattacaaaagaaaacaataaaacaatgtgaatttttataataaaatgtgaactgatgtagcaaattacgcaaatgtgaagcctcttctgataacacttgttaggcctcttactgatgtcagtttcagtttgtaaaatatgtttcatgctttcagttcagcattgtgactcagtaattacagaaaatggcacaaatgtgcatgaccaatgggtttgtatgtctatgaacactgcattgtttcaggtggacattttatcattttcaaatgtttctcacaatgtatgttatagtattattattatatattgtgttcaaatgcattctaaagagacttttatatgaggtgaataaagaaaagcatgattagattagtctgtaggcccacttatttcacaattagttctgacatatgaaaagcagatctttctcttctcttgtgccattccccacaaagaaagccaaccactgtgtccagccaacatcacaactgaagtttcagaatctatgtccaaaaagtcccctagtttggaacatttcgcttttttcttagcaactgttcacccagctcaatgatgcaggaagggggttgaggaaggaaaacaaaacaaaaccactttgctcatctcgaactatttccttctacctctttaagagtctgaagagtttaatctactagataaataagggaatccccaacttggctgagtcctctagaaaagtgaatcatagattatagaacattagtataatgcagtcagagagtcccattgattcatttgacacatgaagaatctgaggtccaaagagtcatcttaaaccacaacccacagagcatgggtggacactcagggttttctcagtgatccatgcagcctcttgttggtcatatggctaggattttctttctggaaagaactttttatatataagaaaaatacttaatgctttgttgaaatcttaaagtcagcattttaaaatattttatcctgagaagagtgtgtgtgtgtgtgtgtgtgtgtgtgtgtttatgtgtgtgtttgttgcagaaggttgcaaacaagaatcggtgttggcccataataatttagccacaagggagtgctctgtgaaccagtaagatggtcttctctaaacacagctgaaattaagatgagccgacatttcagaaccagcttgcctgctagttgcagagctatttccaacattttccatcatctctgatatctgattgtgcctcaccatctctgagagtttgaaaaggagcaaaataaattgcttacaatagccacaggtgtgagttttacaatgcccagagctagaaatatttgcaggtttgttttctactgagaagaggttcttaattaacccttattgcaaataagaatcatgtgggaaatacatatatttaaaaacacttgtttggggcccatcctcctcccagatttctgattgaattgatcttgggcaaagccctgggcatcagattttaaaaatttcccccaggctggagtgcactgacatgatctcggctcactgcaacctctacttcccagattcaagcaattcttgtgcctcagcctcccatatagctgggactacaggtgcatgccaccacacctggctaattttttgtatcttagtagagatggggtttcaccatgttgcccgggctggtctcgaactcctgagctcaggcaatctgcccacttcagcctcccaaagtgctaggattataggcacaaggcactgcacccagtctctccctaggtaatcttaacgtgcaattggagtagagatccaccgctccaaaacagagaatcatgcctgcagctgaggtgttctttcacccccactgtcttcagatattcattgtgaactcatcatggacagcatattatgcccaatatagctattttaaacagtaaattttgttatatcctggttttatcttactggctgacttctaactaacttttaggtaagatgaaactgcacagtttcactagtttcctatacggaaatctcaagaaccaggtcagacctcaggcatccaagctaactagacccttcatgagtgcagaaaccatgcctagtactttctcctcctggcacagcgttcatgctcagacatttgttgcatcaatctggatgttgatgatgtaaaatttcaattaacaggaagatcagaag

SEQ ID NO: 5 - DNA, 24 bp, Artificial Sequence
  PCR Primer
cacattttacttccttcccctgtt

SEQ ID NO: 6 - DNA, 20 bp, Artificial Sequence
  PCR Primer
actgttggaggcaggcaaac

SEQ ID NO: 7 - DNA, 34 bp, Artificial Sequence
  PCR Probe
tccagtccaactccacagtcactcttaaaacttc

SEQ ID NO: 8 - DNA, 19 bp, Artificial Sequence
  PCR Primer
gaaggtgaaggtcggagtc

SEQ ID NO: 9 - DNA, 20 bp, Artificial Sequence
  PCR Primer
gaagatggtgatgggatttc

SEQ ID NO: 10 - DNA, 20 bp, Artificial Sequence
  PCR Probe
caagcttcccgttctcagcc

SEQ ID NO: 11 - DNA, 20 bp, Artificial Sequence
  Antisense Oligonucleotide
caggaatggaggtgttagcg

SEQ ID NO: 12 - DNA, 20 bp, Artificial Sequence
  Antisense Oligonucleotide
actctctctgccttagtcat

SEQ ID NO: 13 - DNA, 20 bp, Artificial Sequence
  Antisense Oligonucleotide
atggctggtgccaagtttcc

SEQ ID NO: 14 - DNA, 20 bp, Artificial Sequence
  Antisense Oligonucleotide
catttagtatctaatgtgag

SEQ ID NO: 15 - DNA, 20 bp, Artificial Sequence
  Antisense Oligonucleotide
ataacccaactcatgcccac

SEQ ID NO: 16 - DNA, 20 bp, Artificial Sequence
  Antisense Oligonucleotide
acctcttcaaagtcagtagt

SEQ ID NO: 17 - DNA, 20 bp, Artificial Sequence
  Antisense Oligonucleotide
atcacagtggtgctctgcct

SEQ ID NO: 18 - DNA, 20 bp, Artificial Sequence
  Antisense Oligonucleotide
tgaaggtgcccccgtgctcc

SEQ ID NO: 19 - DNA, 20 bp, Artificial Sequence
  Antisense Oligonucleotide
taagattcttctgcaaacaa

SEQ ID NO: 20 - DNA, 20 bp, Artificial Sequence
  Antisense Oligonucleotide
cctcaggctgccctcgcaga

SEQ ID NO: 21 - DNA, 20 bp, Artificial Sequence
  Antisense Oligonucleotide
caatgcagtttgctgacact

SEQ ID NO: 22 - DNA, 20 bp, Artificial Sequence
  Antisense Oligonucleotide
cctcttaggatgtctgttat

SEQ ID NO: 23 - DNA, 20 bp, Artificial Sequence
  Antisense Oligonucleotide
ggaaaatatcccctcttagg

SEQ ID NO: 24 - DNA, 20 bp, Artificial Sequence
  Antisense Oligonucleotide
gcttttcttcattatagagg

SEQ ID NO: 25 - DNA, 20 bp, Artificial Sequence
  Antisense Oligonucleotide
gtgttactggaagaactgta

SEQ ID NO: 26 - DNA, 20 bp, Artificial Sequence
  Antisense Oligonucleotide
taccatctccctcaggagtc

SEQ ID NO: 27 - DNA, 20 bp, Artificial Sequence
  Antisense Oligonucleotide
ctggctgtgcccaggaaagg

SEQ ID NO: 28 - DNA, 20 bp, Artificial Sequence
  Antisense Oligonucleotide
ctgcgctggctgtgcccagg

SEQ ID NO: 29 - DNA, 20 bp, Artificial Sequence
  Antisense Oligonucleotide
acacttcgcaagctggcaag

SEQ ID NO: 30 - DNA, 20 bp, Artificial Sequence
  Antisense Oligonucleotide
agattcttcttgtgggttga

SEQ ID NO: 31 - DNA, 20 bp, Artificial Sequence
  Antisense Oligonucleotide
ttatctgggtcatgagctgc

SEQ ID NO: 32 - DNA, 20 bp, Artificial Sequence
  Antisense Oligonucleotide
tccacttatctgggtcatga

SEQ ID NO: 33 - DNA, 20 bp, Artificial Sequence
  Antisense Oligonucleotide
ttcactccacttatctgggt

SEQ ID NO: 34 - DNA, 20 bp, Artificial Sequence
  Antisense Oligonucleotide
tttgttcaggtcttccagct

SEQ ID NO: 35 - DNA, 20 bp, Artificial Sequence
  Antisense Oligonucleotide
taaagtcatcatgtaggtta

SEQ ID NO: 36 - DNA, 20 bp, Artificial Sequence
  Antisense Oligonucleotide
tcttctaaagtcatcatgta

SEQ ID NO: 37 - DNA, 20 bp, Artificial Sequence
  Antisense Oligonucleotide
gctgcaaaaatggcagccag

SEQ ID NO: 38 - DNA, 20 bp, Artificial Sequence
  Antisense Oligonucleotide
tggcagctgcaaaaatggca

SEQ ID NO: 39 - DNA, 20 bp, Artificial Sequence
  Antisense Oligonucleotide
atggatggcagctgcaaaaa

SEQ ID NO: 40 - DNA, 20 bp, Artificial Sequence
  Antisense Oligonucleotide
tgaacttgtaactttcttcg

SEQ ID NO: 41 - DNA, 20 bp, Artificial Sequence
  Antisense Oligonucleotide
ccagttcctgttatcttcta

SEQ ID NO: 42 - DNA, 20 bp, Artificial Sequence
  Antisense Oligonucleotide
tctttgtgctgctgaaatag

SEQ ID NO: 43 - DNA, 20 bp, Artificial Sequence
  Antisense Oligonucleotide
caatgtctatgtcagtctct

SEQ ID NO: 44 - DNA, 20 bp, Artificial Sequence
  Antisense Oligonucleotide
tgggctggccctaccacata

SEQ ID NO: 45 - DNA, 20 bp, Artificial Sequence
  Antisense Oligonucleotide
caaccgtgggatttcctgag

SEQ ID NO: 46 - DNA, 20 bp, Artificial Sequence
  Antisense Oligonucleotide
aaatgaagttattagtcagt

SEQ ID NO: 47 - DNA, 20 bp, Artificial Sequence
  Antisense Oligonucleotide
gcacacaggttggcagacaa

SEQ ID NO: 48 - DNA, 20 bp, Artificial Sequence
  Antisense Oligonucleotide
aaaaggcacacaggttggca

SEQ ID NO: 49 - DNA, 20 bp, Artificial Sequence
  Antisense Oligonucleotide
tcaacaggcattttaaagac

SEQ ID NO: 50 - DNA, 20 bp, Artificial Sequence
  Antisense Oligonucleotide
tactgttggaggcaggcaaa

SEQ ID NO: 51 - DNA, 20 bp, Artificial Sequence
  Antisense Oligonucleotide
agggaacggtctcttataag

SEQ ID NO: 52 - DNA, 20 bp, Artificial Sequence
  Antisense Oligonucleotide
ttcttctgcaaacaaacaca

SEQ ID NO: 53 - DNA, 20 bp, Artificial Sequence
  Antisense Oligonucleotide
caatgatagtaggatccagt

SEQ ID NO: 54 - DNA, 20 bp, Artificial Sequence
  Antisense Oligonucleotide
tcagaagaatcatctgtgag

SEQ ID NO: 55 - DNA, 20 bp, Artificial Sequence
  Antisense Oligonucleotide
acctgaaacaatgcagtgtt

SEQ ID NO: 56 - DNA, 20 bp, Artificial Sequence
  Antisense Oligonucleotide
cagcccttacctcaggctgc

SEQ ID NO: 57 - DNA, 20 bp, Artificial Sequence
  Antisense Oligonucleotide
tttttaatacctacaggaga

SEQ ID NO: 58 - DNA, 20 bp, Artificial Sequence
  Antisense Oligonucleotide
cttatcttaccatgtatgag

SEQ ID NO: 59 - DNA, 20 bp, Artificial Sequence
  Antisense Oligonucleotide
tgcacagtagcaatatcata

SEQ ID NO: 60 - DNA, 20 bp, Artificial Sequence
  Antisense Oligonucleotide
cagaaatgctataggtatgt

SEQ ID NO: 61 - DNA, 20 bp, Artificial Sequence
  Antisense Oligonucleotide
ttggaaaatttaggttctaa

SEQ ID NO: 62 - DNA, 20 bp, Artificial Sequence
  Antisense Oligonucleotide
taatacatacctgggcaaaa

SEQ ID NO: 63 - DNA, 20 bp, Artificial Sequence
  Antisense Oligonucleotide
tggcaaggacctagaagaaa

SEQ ID NO: 64 - DNA, 20 bp, Artificial Sequence
  Antisense Oligonucleotide
ttagagactgttggtttcca

SEQ ID NO: 65 - DNA, 20 bp, Artificial Sequence
  Antisense Oligonucleotide
catctcttaccttgttagaa

SEQ ID NO: 66 - DNA, 20 bp, Artificial Sequence
  Antisense Oligonucleotide
aatatcttacctaagaaagt

SEQ ID NO: 67 - DNA, 20 bp, Artificial Sequence
  Antisense Oligonucleotide
ttctgcttgtctgcaacaga

SEQ ID NO: 68 - DNA, 20 bp, Artificial Sequence
  Antisense Oligonucleotide
tacgcttggtactaaacccg

SEQ ID NO: 69 - DNA, 20 bp, Artificial Sequence
  Antisense Oligonucleotide
tggaacaaaatgcgtagttg

SEQ ID NO: 70 - DNA, 20 bp, Artificial Sequence
  Antisense Oligonucleotide
catgagtcctgactataatg

SEQ ID NO: 71 - DNA, 20 bp, Artificial Sequence
  Antisense Oligonucleotide
tcaaaagcatagaagcatcc

SEQ ID NO: 72 - DNA, 20 bp, Artificial Sequence
  Antisense Oligonucleotide
ggtaatctcggaagctcaag

SEQ ID NO: 73 - DNA, 20 bp, Artificial Sequence
  Antisense Oligonucleotide
aatagaaaagcatgtgaggc

SEQ ID NO: 74 - DNA, 20 bp, Homo sapiens
ggaaacttggcaccagccat

SEQ ID NO: 75 - DNA, 20 bp, Homo sapiens
ctcacattagatactaaatg

SEQ ID NO: 76 - DNA, 20 bp, Homo sapiens
gtgggcatgagttgggttat

SEQ ID NO: 77 - DNA, 20 bp, Homo sapiens
actactgactttgaagaggt

SEQ ID NO: 78 - DNA, 20 bp, Homo sapiens
ggagcacgggggcaccttca

SEQ ID NO: 79 - DNA, 20 bp, Homo sapiens
ttgtttgcagaagaatctta

SEQ ID NO: 80 - DNA, 20 bp, Homo sapiens
tctgcgagggcagcctgagg

SEQ ID NO: 81 - DNA, 20 bp, Homo sapiens
cctaagaggggatattttcc

SEQ ID NO: 82 - DNA, 20 bp, Homo sapiens
cttgccagcttgcgaagtgt

SEQ ID NO: 83 - DNA, 20 bp, Homo sapiens
tcaacccacaagaagaatct

SEQ ID NO: 84 - DNA, 20 bp, Homo sapiens
gcagctcatgacccagataa

SEQ ID NO: 85 - DNA, 20 bp, Homo sapiens
tcatgacccagataagtgga

SEQ ID NO: 86 - DNA, 20 bp, Homo sapiens
acccagataagtggagtgaa

SEQ ID NO: 87 - DNA, 20 bp, Homo sapiens
taacctacatgatgacttta

SEQ ID NO: 88 - DNA, 20 bp, Homo sapiens
tacatgatgactttagaaga

SEQ ID NO: 89 - DNA, 20 bp, Homo sapiens
tttttgcagctgccatccat

SEQ ID NO: 90 - DNA, 20 bp, Homo sapiens
cgaagaaagttacaagttca

SEQ ID NO: 91 - DNA, 20 bp, Homo sapiens
tagaagataacaggaactgg

SEQ ID NO: 92 - DNA, 20 bp, Homo sapiens
ctatttcagcagcacaaaga

SEQ ID NO: 93 - DNA, 20 bp, Homo sapiens
agagactgacatagacattg

SEQ ID NO: 94 - DNA, 20 bp, Homo sapiens
tatgtggtagggccagccca

SEQ ID NO: 95 - DNA, 20 bp, Homo sapiens
ctcaggaaatcccacggttg

SEQ ID NO: 96 - DNA, 20 bp, Homo sapiens
actgactaataacttcattt

SEQ ID NO: 97 - DNA, 20 bp, Homo sapiens
ttgtctgccaacctgtgtgc

SEQ ID NO: 98 - DNA, 20 bp, Homo sapiens
tgccaacctgtgtgcctttt

SEQ ID NO: 99 - DNA, 20 bp, Homo sapiens
gtctttaaaatgcctgttga

SEQ ID NO: 100 - DNA, 20 bp, Homo sapiens
tttgcctgcctccaacagta

SEQ ID NO: 101 - DNA, 20 bp, Homo sapiens
tgtgtttgtttgcagaagaa

SEQ ID NO: 102 - DNA, 20 bp, Homo sapiens
actggatcctactatcattg

SEQ ID NO: 103 - DNA, 20 bp, Homo sapiens
ctcacagatgattcttctga

SEQ ID NO: 104 - DNA, 20 bp, Homo sapiens
aacactgcattgtttcaggt

SEQ ID NO: 105 - DNA, 20 bp, Homo sapiens
ttagaacctaaattttccaa

SEQ ID NO: 106 - DNA, 20 bp, Homo sapiens
tttcttctaggtccttgcca

SEQ ID NO: 107 - DNA, 20 bp, Homo sapiens
tctgttgcagacaagcagaa

SEQ ID NO: 108 - DNA, 20 bp, Homo sapiens
cgggtttagtaccaagcgta

SEQ ID NO: 109 - DNA, 20 bp, Homo sapiens
caactacgcattttgttcca

SEQ ID NO: 110 - DNA, 20 bp, Homo sapiens
cattatagtcaggactcatg

SEQ ID NO: 111 - DNA, 20 bp, Homo sapiens
ggatgcttctatgcttttga

SEQ ID NO: 112 - DNA, 20 bp, Homo sapiens
cttgagcttccgagattacc

SEQ ID NO: 113 - DNA, 20 bp, Homo sapiens
gcctcacatgcttttctatt
